(19) United States
(12) Patent Application Publication
(10) Pub. No.: US 2010/0099746 A1
(43) Pub. Date: Apr. 22, 2010

(54) NOVEL NUCLEIC ACID

(75) Inventors: Yoji Yamada, Sunto-gun (JP); Tatsuya Miyazawa, Machida-shi (JP); Tetsuo Yoshida, Machida-shi (JP); Haruo Nakano, Machida-shi (JP); Kyoko Kosaka, Machida-shi (JP)

Correspondence Address: LEYDIG VOIT & MAYER, LTD, TWO PRUDENTIAL PLAZA, SUITE 4900, 180 NORTH STETSON AVENUE, CHICAGO, IL, 60601-6731, US

(73) Assignee: KYOWA HAKKO KIRIN CO., LTD., Tokyo (JP)

(21) Appl. No.: 12/519,960

(22) PCT Filed: Dec. 18, 2007
(86) PCT No.: PCT/IB07/04005

§ 371 Date: Jun. 18, 2009

(30) Foreign Application Priority Data
Dec. 18, 2006 (JP) 2006-339997

(51) Int. Cl. A61K 31/7088; C07H 21/04; C12N 15/63; C12N 5/10; C12Q 1/02; C12Q 1/68; A61P 35/00

(52) U.S. Cl. 514/44 R; 536/23.1; 435/320.1; 435/325; 435/29; 435/6

(57) ABSTRACT

The present invention provides a nucleic acid such as a micro-RNA or a micro-RNA precursor, having a novel sequence. The nucleic acid of the present invention is useful for detecting the expression or a mutation of a micro-RNA, separating cells, suppressing the expression of a gene having a target sequence, screening for a substance that promotes or suppresses a function of a micro-RNA, and diagnosing or treating a disease caused by a mast cell abnormality, a disease caused by an abnormality of mesenchymal stem cell proliferation or differentiation, cancers, and a disease caused by abnormal proliferation of cells, tissue hyperplasia or the like.

### TECHNICAL FIELD

[0001] The present invention relates to a novel nucleic acid, a method of expressing or suppressing the nucleic acid, and a diagnostic reagent or a therapeutic agent comprising the nucleic acid.

### BACKGROUND ART

[0002] A micro-RNA (miRNA), which is one type of nucleic acid, is a small non-coding single-stranded RNA of about 22 nucleotides that is not translated into a protein, and has been confirmed as being present in many types in organisms, including humans (non-patent documents 1 and 2).

[0003] A micro-RNA is produced from a gene transcribed to a single or clustered micro-RNA precursor. Specifically, first, a primary-microRNA (pri-miRNA), which is a primary transcript, is transcribed from the gene, then, in stepwise processing from the pri-miRNA to a mature type micro-RNA, a precursor-microRNA (pre-miRNA) of about 70 nucleotides having a characteristic hairpin structure is produced from the pri-miRNA. Furthermore, the mature type micro-RNA is produced from the pre-miRNA by Dicer-mediated processing (non-patent document 3).

[0004] A mature type micro-RNA is thought to be involved in the post-transcriptional control of gene expression by complementarily binding to a target mRNA to suppress the translation of the mRNA, or to degrade the mRNA. As of May 2006, in the micro-RNA database miRBase (http://microrna.sanger.ac.uk/), 455 species of micro-RNAs were registered for humans, and 3685 species for all organisms. Of the micro-RNAs expressed in mammals, including humans, only some have their physiological functions elucidated to date, including miR-181, which is involved in hematopoietic lineage differentiation (non-patent document 4), miR-375, which is involved in insulin secretion (non-patent document 5), and the like; many have their bioactivities unclarified. However, studies using nematodes or Drosophila have shown that micro-RNAs play various important roles in the development and differentiation in organisms, and a report of the relation to human diseases has been presented suggesting a profound relation to cancers (non-patent document 6).

[0005] For identification of micro-RNAs, there are a method wherein a low-molecular RNA is cloned from a cell, a method wherein bioinformatics is applied to genome sequence information, and the like. Registration of any micro-RNA in the miRBase requires both information on the expression and information on the biosynthesis and structure; a structural prediction from genome sequence information only does not suffice approval as a micro-RNA (non-patent document 7).

[0006] Mast cells are known to be activated by various stimuli to undergo degranulation and release or produce many inflammatory mediators (non-patent documents 8 to 10). For example, it is known that when an antigen is recognized by a mast cell, histamine and tryptase are quickly released upon degranulation, and chemical mediators such as prostaglandin D2 (PGD2), leukotriene (LT), and platelet activation factor (PAF), various chemokines such as macrophage inflammatory protein (MIP)-1α, and various cytokines such as granulocyte macrophage colony stimulation factor (GM-CSF) are newly synthesized and released. Regarding major basic proteins, which are cytotoxic proteins that have been thought to be produced by eosinophils, it has recently been shown that in the case of humans, they are produced in large amounts by mast cells (non-patent document 11).

[0007] Hence, mast cells are thought to play major roles in the pathogenesis of various allergic diseases; therefore, it is thought that by controlling a function of mast cells, treatment of allergic diseases is possible.

[0008] However, it is known that rodent mast cells and human mast cells have different reactivities to drugs (non-patent document 9). Specifically, sodium cloroglycate, which is used as a suppressant of inflammatory mediator release, remarkably suppresses the IgE-dependent release of inflammatory mediators in rat abdominal mast cells, but the action thereof on human mast cells is not potent (non-patent document 12). Azelastine hydrochloride, at high concentrations, suppresses the release of histamine, PGD2, and LT and production of GM-CSF and MIP-1α, from human mast cells in culture, but none of these activities are potent. Suplatast tosilate, which is used as an anti-cytokine drug, exhibits inflammatory mediator release suppressive action on rat mast cells, but lacks action on human mast cells (non-patent document 12).

[0009] As a result of a comparison of genes expressed in human mast cells and mouse mast cells, it is known that the genes expressed by various stimuli do not always agree (non-patent document 13).

[0010] Regarding micro-RNAs, micro-RNAs expressed in mouse bone marrow derived mast cells have been reported (non-patent document 14), but no relationship is known between a micro-RNA and a function of mast cells. No report is available on a micro-RNA expressed in human mast cells; taking into account the above-described interspecific differences between humans and mice, it is difficult to predict information on the expression of micro-RNAs in human mast cells on the basis of information on the expression of micro-RNAs in mouse mast cells.

[0011] Mesenchymal stem cells are present in mammalian bone marrow, fat tissue, umbilical blood and the like, and are known as multipotent stem cells that differentiate into adipocytes, chondrocytes, osteocytes and the like. Mesenchymal stem cells, because of the multipotency thereof, are attracting attention as graft materials for regenerative medicine for many tissues, including bones, cartilage, tendons, muscles, fat, and periodontal tissue (non-patent document 15).

[0012] Mesenchymal stem cells can be differentiated into particular cells in vitro by the addition of a drug, a cytokine and the like; for example, differentiation into adipocytes can be induced by allowing 1-methyl-3-isobutylxanthine, dexamethasone, insulin and indomethacin to act, and differentiation into osteoblasts can be induced by allowing dexamethasone, β-glycerol phosphate, and ascorbic acid to act (non-patent document 16). However, details of the molecular mechanisms in these differentiation processes are unknown. From the results of gene expression analyses on gene-knockout mice and in the differentiation stage, it is known that differentiation into adipocytes is mediated by the PPARγ and C/EBP families, and that during osteoblast differentiation, the expression of genes such as Cbfa1/Runx2 and Osterix is involved (non-patent document 17); however, the mechanisms of differentiation from mesenchymal stem cells cannot be explained solely on the basis of these genes, and artificial control of the differentiation and proliferation has not been realized. Also, no micro-RNA is known to act on the differentiation and proliferation of mesenchymal stem cells.

[0013] Because micro-RNAs are involved in the control of the expression of a wide variety of genes, abnormalities of micro-RNAs are supposed to be involved in various human diseases. Particularly in cancers, research has been advanced; it has been reported that in many cancers, the expression of micro-RNAs differs from that in normal tissues, that classification of cancers is enabled by expression profile analyses of micro-RNAs, and the like (non-patent document 18). It is also known that about half of the human micro-RNAs that have been found so far are present in chromosome aberrations or fragile portions of chromosomes known in human cancers (non-patent document 19). Examples of relationships between cancers and micro-RNAs that have been reported so far include the finding that the miR-15a/miR-16 cluster is contained in chromosome 13q14, which is deleted in B cell chronic lymphatic leukemia (B-CLL), the deletion being supposed to be a cause of B-CLL (non-patent document 20), the finding that in lung cancer, the expression of Let-7, which is a micro-RNA, is decreased, one of the targets thereof being Ras, which is known as a carcinogenic gene (non-patent documents 21 and 22), and the like. Many micro-RNAs have their expression decreased in cancer cells; conversely, however, there are some micro-RNAs with gene amplification or overexpression in cancers. For example, in regions where gene amplification is seen in malignant lymphoma, a cluster consisting of six species of micro-RNAs (miR-17-92) is present; it has been reported that when this miRNA cluster gene is forcibly expressed in a mouse model of human B cell lymphoma, the onset of lymphoma is promoted (non-patent document 23). It has also been shown that a gene called BIC, which does not encode a protein and has been regarded as a candidate for the cancer gene that is overexpressed in Hodgkin lymphoma, encodes miR-155 (non-patent document 24).

[0014] As stated above, relationships between cancers and micro-RNAs have recently been reported in many cases, but most of them show expression abnormalities in cancer cells; there are only a few studies showing a function of a micro-RNA, including a report that the proliferation of a cancer cell line was inhibited by forcibly expressing Let-7 in a lung cancer cell line (non-patent document 25) and the like. Currently, no report is available that cancer growth was suppressed in an animal model by administering a micro-RNA or a precursor thereof, or an antisense oligonucleotide thereof, from outside the body to increase or decrease the expression of the micro-RNA.
[0015] non-patent document 1: Science, 294, 853-858 (2001)
[0016] non-patent document 2: Cell, 113, 673-676 (2003)
[0017] non-patent document 3: Nature Reviews Genetics, 5, 522-531 (2004)
[0018] non-patent document 4: Science, 303, 83-86 (2004)
[0019] non-patent document 5: Nature, 432, 226-230 (2004)
[0020] non-patent document 6: Nature Reviews Cancer, 6, 259-269 (2006)
[0021] non-patent document 7: RNA, 9, 277-279 (2003)
[0022] non-patent document 8: Himan Saibo no Rinsho, ed. Motohito Kurosawa, Sentan Igaku-sha Ltd., p 142 (2001)
[0023] non-patent document 9: Himan Saibo no Rinsho, ed. Motohito Kurosawa, Sentan Igaku-sha Ltd., p 559 (2001)
[0024] non-patent document 10: Crit. Rev. Immunol., 22, 115-140 (2002)]
[0025] non-patent document 11: Blood, 98, 1127-1134 (2001)
[0026] non-patent document 12: Clin. Exp. Allergy, 28, 1228-1236 (1998)
[0027] non-patent document 13: Blood, 100, 3861-3868 (2002)
[0028] non-patent document 14: Genome Biology, 6, R71 (2005)
[0029] non-patent document 15: Idenshi Igaku, vol. 4, p. 58-61 (2000)
[0030] non-patent document 16: Science, 284, 143-147 (1999)
[0031] non-patent document 17: Jikken Igaku, vol. 20, p. 2459-2464 (2000)
[0032] non-patent document 18: Nature, 435, 839-843 (2005)
[0033] non-patent document 19: Proc. Natl. Acad. Sci. USA, 101, 2999-3004 (2004)
[0034] non-patent document 20: Proc. Natl. Acad. Sci. USA, 99, 15524-15529 (2002)
[0035] non-patent document 21: Cancer Research, 64, 3753-3756, (2004)
[0036] non-patent document 22: Cell, 120, 635-647, (2005)
[0037] non-patent document 23: Nature, 435, 823-833 (2005)
[0038] non-patent document 24: Proc. Natl. Acad. Sci. USA, 102, 3627-3632 (2005)
[0039] non-patent document 25: Cancer Research, 64, 3753-3756, (2004)

### DISCLOSURE OF THE INVENTION

### Problems to be Solved by the Invention

[0040] It is expected that by identifying micro-RNAs expressed in various human organs, and analyzing the functions thereof to elucidate their relations to diseases, new therapeutic agents and diagnostic reagents will be developed.

[0041] Finding a micro-RNA that acts in mast cells is expected to lead to the functional elucidation of differentiation, degranulation, inflammatory mediator production, cytokine production, chemokine production and the like in mast cells, and to lead to the development of methods of isolation, cultivation, differentiation control, degranulation control, inflammatory mediator production control, cytokine production control, and chemokine production control for mast cells, as well as new therapies for allergic diseases and the like based thereon.

[0042] In addition, finding a micro-RNA that acts in mesenchymal stem cells is expected to lead to the functional elucidation of differentiation and proliferation of mesenchymal stem cells, and to lead to the development of a method of controlling the differentiation from mesenchymal stem cells to particular cells and a new therapy based on differentiation control.

[0043] Furthermore, finding a micro-RNA that causes cancer cell proliferation or suppression is expected not only to help to understand the mechanisms of carcinogenesis, but also to lead to the development of diagnostic reagents and therapeutic agents for human cancers, and new diagnostic methods and therapies for cancers based thereon. Furthermore, regarding diseases other than cancers, the same is expected to contribute to the development of diagnostic reagents and therapeutic agents for diseases caused by abnormal proliferation of cells, tissue hyperplasia and the like, such as arteriosclerosis, rheumatoid arthritis, prostatic hyperplasia, blood vessel restenosis after percutaneous transvascular coronary angioplasty, fibroid lung, glomerulonephritis, and autoimmune diseases, and diagnostic methods and therapies based thereon.

[0044] It is an object of the present invention to acquire micro-RNAs, and to provide nucleic acids that are useful in isolation, cultivation, differentiation control, degranulation control, inflammatory mediator production control, cytokine production control, and chemokine production control in mast cells, diagnosis and treatment of allergic diseases, control of mesenchymal stem cell differentiation and proliferation, control of cancer cell differentiation and proliferation, and diagnosis and treatment of diseases such as cancers, as well as methods of utilizing the same.

### Means of Solving the Problems

[0045] The present invention relates to (1) to (64) below.
[0046] (1) A nucleic acid consisting of the nucleotide sequence of any one of SEQ ID NOs:1 to 1336.
[0047] (2) A nucleic acid consisting of a nucleotide sequence having an identity of 90% or more to the nucleotide sequence of any one of SEQ ID NOs:1 to 1336.
[0048] (3) A nucleic acid that hybridizes under stringent conditions with a strand complementary to a nucleic acid consisting of the nucleotide sequence of any one of SEQ ID NOs:1 to 1336.
[0049] (4) A nucleic acid comprising the nucleic acid described in any one of (1) to (3).
[0050] (5) A nucleic acid consisting of the nucleotide sequence of any one of SEQ ID NOs:1337 to 2851.
[0051] (6) A nucleic acid consisting of a nucleotide sequence having an identity of 80% or more to the nucleotide sequence of any one of SEQ ID NOs:1337 to 2851.
[0052] (7) A nucleic acid that hybridizes under stringent conditions with a strand complementary to a nucleic acid consisting of the nucleotide sequence of any one of SEQ ID NOs:1337 to 2851.
[0053] (8) A nucleic acid consisting of a nucleotide sequence complementary to the nucleic acid described in any one of (1) to (7).
[0054] (9) A double-stranded nucleic acid consisting of the nucleic acid described in any one of (1) to (7) and a nucleic acid consisting of a nucleotide sequence complementary to the nucleotide sequence of the nucleic acid.
[0055] (10) A vector which expresses the nucleic acid described in any one of (1) to (9).
[0056] (11) A method of detecting the expression or mutation of the nucleic acid described in any one of (1) to (9), comprising using the nucleic acid described in any one of (1) to (9).
[0057] (12) A method for screening a substance that promotes or suppresses the expression or function of the nucleic acid described in any one of (1) to (9), comprising using the nucleic acid described in any one of (1) to (9).
[0058] (13) A method of separating a cell that expresses the nucleic acid described in any one of (1) to (9), comprising using the nucleic acid described in any one of (1) to (9).
[0059] (14) A method of suppressing the expression of a target gene of the nucleic acid described in any one of (1) to (9), comprising using the nucleic acid described in any one of (1) to (9).
[0060] (15) A diagnostic reagent or a therapeutic agent for a disease caused by a mast cell abnormality, comprising the nucleic acid described in any one of (1) to (9) as an active ingredient.
[0061] (16) A diagnostic reagent or a therapeutic agent for a disease caused by a mast cell abnormality, comprising a substance that promotes or suppresses the expression or function of the nucleic acid described in any one of (1) to (9) as an active ingredient.
[0062] (17) A method for screening a diagnostic reagent or a therapeutic agent for a disease caused by a mast cell abnormality, wherein promotion or suppression of the expression or function of the nucleic acid described in any one of (1) to (9) serves as an index.
[0063] (18) A diagnostic reagent or a therapeutic agent for a disease caused by a mast cell abnormality, comprising a substance that suppresses the expression of a target gene of the nucleic acid described in any one of (1) to (9) as an active ingredient.
[0064] (19) A method for screening a diagnostic reagent or a therapeutic agent for a disease caused by a mast cell abnormality, wherein suppression of the expression of a target gene of the nucleic acid described in any one of (1) to (9) serves as an index.
[0065] (20) A cell incorporating the nucleic acid or vector described in any one of (1) to (10).
[0066] (21) A mast cell degranulation promoter comprising the nucleic acid described in any one of (1) to (4) wherein the SEQ ID NO: is any one of 1, 2, 3, 8, 14, 20, 22, 25, 32 and 36, as an active ingredient.
[0067] (22) A mast cell degranulation promoter comprising the nucleic acid described in any one of (5) to (7) wherein the SEQ ID NO: is any one of 1337, 1338, 1339, 1352, 1363, 1371, 1373, 1377, 1386 and 1390, as an active ingredient.
[0068] (23) A mast cell degranulation suppressant comprising a nucleic acid consisting of a nucleotide sequence complementary to the nucleic acid described in (21) or (22) as an active ingredient.
[0069] (24) A mast cell degranulation promoter or degranulation suppressant comprising a double-stranded nucleic acid consisting of the nucleic acid described in (21) or (22) and a nucleic acid consisting of a nucleotide sequence complementary to the nucleotide sequence of the nucleic acid, as an active ingredient.
[0070] (25) A mast cell degranulation promoter or degranulation suppressant comprising a substance that promotes or suppresses the expression or function of the nucleic acid described in (21) or (22) as an active ingredient.
[0071] (26) A method for screening a mast cell degranulation promoter or degranulation suppressant, wherein promotion or suppression of the expression or function of the nucleic acid described in (21) or (22) serves as an index.
[0072] (27) A mast cell degranulation promoter or degranulation suppressant comprising a substance that suppresses or promotes the expression of a target gene of the nucleic acid described in (21) or (22) as an active ingredient.
[0073] (28) A method for screening a mast cell degranulation promoter or degranulation suppressant, wherein suppression or promotion of the expression of a target gene of the nucleic acid described in (21) or (22) serves as an index.
[0074] (29) A diagnostic reagent or a therapeutic agent for a disease caused by an abnormality of mesenchymal stem cell proliferation and/or differentiation, comprising the nucleic acid described in any one of (1) to (4) wherein the SEQ ID NO: is any one of 1, 8, 21 and 36, as an active ingredient.
[0075] (30) A diagnostic reagent or a therapeutic agent for a disease caused by an abnormality of mesenchymal stem cell proliferation and/or differentiation, comprising the nucleic acid described in any one of (5) to (7) wherein the SEQ ID NO: is any one of 1337, 1352, 1372 and 1390, as an active ingredient.
[0076] (31) A diagnostic reagent or a therapeutic agent for a disease caused by an abnormality of mesenchymal stem cell proliferation and/or differentiation, comprising a nucleic acid consisting of a nucleotide sequence complementary to the nucleic acid described in (29) or (30) as an active ingredient.
[0077] (32) A diagnostic reagent or a therapeutic agent for a disease caused by an abnormality of mesenchymal stem cell proliferation and/or differentiation, comprising a double-stranded nucleic acid consisting of the nucleic acid described in (29) or (30) and a nucleic acid consisting of a nucleotide sequence complementary to the nucleotide sequence of the nucleic acid as an active ingredient.
[0078] (33) A diagnostic reagent or a therapeutic agent for a disease caused by an abnormality of mesenchymal stem cell proliferation and/or differentiation, comprising a substance that promotes or suppresses the expression or function of the nucleic acid described in (29) or (30) as an active ingredient.
[0079] (34) A method for screening a diagnostic reagent or a therapeutic agent for a disease caused by an abnormality of mesenchymal stem cell proliferation and/or differentiation, wherein promotion or suppression of the expression or function of the nucleic acid described in (29) or (30) serves as an is index.
[0080] (35) A diagnostic reagent or a therapeutic agent for a disease caused by an abnormality of mesenchymal stem cell proliferation and/or differentiation, comprising a substance that suppresses or promotes the expression of a target gene of the nucleic acid described in (29) or (30) as an active ingredient.
[0081] (36) A method for screening a diagnostic reagent or a therapeutic agent for a disease caused by an abnormality of mesenchymal stem cell proliferation and/or differentiation, wherein suppression or promotion of the expression of a target gene of the nucleic acid described in (29) or (30) serves as an index.
[0082] (37) A mesenchymal stem cell proliferation promoter comprising the nucleic acid described in any one of (1) to (4) wherein the SEQ ID NO: is 1, as an active ingredient.
[0083] (38) A mesenchymal stem cell proliferation promoter comprising the nucleic acid described in any one of (5) to (7) wherein the SEQ ID NO: is 1337, as an active ingredient.
[0084] (39) A mesenchymal stem cell proliferation suppressant comprising a nucleic acid consisting of a nucleotide sequence complementary to the nucleic acid described in (37) or (38) as an active ingredient.
[0085] (40) A mesenchymal stem cell proliferation suppressant comprising the nucleic acid described in any one of (1) to (4) wherein the SEQ ID NO: is any one of 8, 21 and 36, as an active ingredient.
[0086] (41) A mesenchymal stem cell proliferation suppressant comprising the nucleic acid described in any one of (5) to (7) wherein the SEQ ID NO: is any one of 1352, 1372 and 1390, as an active ingredient.
[0087] (42) A mesenchymal stem cell proliferation promoter comprising a nucleic acid consisting of a nucleotide sequence complementary to the nucleic acid described in (37) or (38) as an active ingredient.
[0088] (43) A mesenchymal stem cell proliferation promoter or proliferation suppressant comprising a double-stranded nucleic acid consisting of the nucleic acid described in any one of (37) to (42) and a nucleic acid consisting of a nucleotide sequence complementary to the nucleotide sequence of the nucleic acid, as an active ingredient.
[0089] (44) A mesenchymal stem cell proliferation promoter or proliferation suppressant comprising a substance that promotes or suppresses the expression or function of the nucleic acid described in any one of (37) to (42), as an active ingredient.
[0090] (45) A method for screening a mesenchymal stem cell proliferation promoter or proliferation suppressant, wherein promotion or suppression of the expression or function of the nucleic acid described in any one of (37) to (42) serves as an index.
[0091] (46) A mesenchymal stem cell proliferation promoter or proliferation suppressant comprising a substance that suppresses or promotes the expression of a target gene of the nucleic acid described in any one of (37) to (42) as an active ingredient.
[0092] (47) A method for screening a mesenchymal stem cell proliferation promoter or proliferation suppressant, wherein suppression or promotion of the expression of a target gene of the nucleic acid described in any one of (37) to (42) serves as an index.
[0093] (48) A diagnostic reagent or a therapeutic agent for a disease caused by a cell proliferation abnormality, comprising the nucleic acid described in any one of (1) to (4) wherein the SEQ ID NO: is any one of 1, 3, 8, 20, 21, 22, 32 and 36, as an active ingredient.
[0094] (49) A diagnostic reagent or a therapeutic agent for a disease caused by a cell proliferation abnormality, comprising the nucleic acid described in any one of (5) to (7) wherein the SEQ ID NO: is any one of 1337, 1339, 1352, 1371, 1372, 1373, 1386 and 1390, as an active ingredient.
[0095] (50) A diagnostic reagent or a therapeutic agent for a disease caused by a cell proliferation abnormality, comprising a nucleic acid consisting of a nucleotide sequence complementary to the nucleic acid described in (48) or (49) as an active ingredient.
[0096] (51) A diagnostic reagent or a therapeutic agent for a disease caused by a cell proliferation abnormality, comprising a double-stranded nucleic acid consisting of the nucleic acid described in (48) or (49) and a nucleic acid consisting of a nucleotide sequence complementary to the nucleic acid as an active ingredient.
[0097] (52) A diagnostic reagent or a therapeutic agent for a disease caused by a cell proliferation abnormality, comprising a substance that promotes or suppresses the expression or function of the nucleic acid described in (48) or (49) as an active ingredient.
[0098] (53) A method for screening a diagnostic reagent or a therapeutic agent for a disease caused by a cell proliferation abnormality, wherein promotion or suppression of the expression or function of the nucleic acid described in (48) or (49) serves as an index.
[0099] (54) A diagnostic reagent or a therapeutic agent for a disease caused by a cell proliferation abnormality, comprising a substance that suppresses or promotes the expression of a target gene of the nucleic acid described in (48) or (49) as an active ingredient.
[0100] (55) A method for screening a diagnostic reagent or a therapeutic agent for a disease caused by a cell proliferation abnormality, wherein suppression or promotion of the expression of a target gene of the nucleic acid described in (48) or (49) serves as an index.
[0101] (56) The diagnostic reagent, the therapeutic agent or the screening method described in any one of (48) to (55), wherein the disease caused by a cell proliferation abnormality is a disease selected from the group consisting of cancers, arteriosclerosis, rheumatoid arthritis, prostatic hyperplasia, blood vessel restenosis after percutaneous transvascular coronary angioplasty, fibroid lung, glomerulonephritis and autoimmune diseases.
[0102] (57) A cell proliferation suppressant comprising the nucleic acid described in any one of (1) to (4) wherein the SEQ ID NO: is any one of 1, 3, 8, 20, 21, 22, 32 and 36, as an active ingredient.
[0103] (58) A cell proliferation suppressant comprising the nucleic acid described in any one of (5) to (7) wherein the SEQ ID NO: is any one of 1337, 1339, 1352, 1371, 1372, 1373, 1386 and 1390, as an active ingredient.
[0104] (59) A cell proliferation promoter comprising a nucleic acid consisting of a nucleotide sequence complementary to the nucleic acid described in (57) or (58) as an active ingredient.
[0105] (60) A cell proliferation suppressant or proliferation promoter comprising a double-stranded nucleic acid consisting of the nucleic acid described in (57) or (58) and a nucleic acid consisting of a nucleotide sequence complementary to the nucleotide sequence of the nucleic acid as an active ingredient.
[0106] (61) A cell proliferation suppressant or proliferation promoter comprising a substance that promotes or suppresses the expression or function of the nucleic acid described in (57) or (58) as an active ingredient.
[0107] (62) A method for screening a cell proliferation suppressant or proliferation promoter, wherein promotion or suppression of the expression or function of the nucleic acid described in (57) or (58) serves as an index.
[0108] (63) A cell proliferation suppressant or proliferation promoter comprising a substance that suppresses or promotes the expression of a target gene of the nucleic acid described in (57) or (58) as an active ingredient.
[0109] (64) A method for screening a cell proliferation suppressant or proliferation promoter, wherein suppression or promotion of the expression of a target gene by the nucleic acid described in (57) or (58) serves as an index.

### Effect of the Invention

[0110] According to the present invention, it is possible to provide a novel nucleic acid, a vector that expresses the nucleic acid, a method of detecting the expression and mutation of the nucleic acid, a screening method for a substance that controls the nucleic acid, a method of separating a cell that expresses the nucleic acid, a method of controlling the expression of a target gene of the nucleic acid, a diagnostic reagent or pharmaceutical comprising the nucleic acid or a substance that controls the nucleic acid as an active ingredient, and a diagnostic reagent or pharmaceutical comprising a substance that controls the expression of a target gene of the nucleic acid, as well as a diagnostic reagent or a therapeutic agent for a disease caused by an abnormality of mast cells or mesenchymal stem cells and the like, and diseases such as cancers, an agent that controls cell differentiation or proliferation, and the like.

### BRIEF DESCRIPTION OF THE DRAWINGS

[0111] [FIG. 1] shows the secondary structure of the nucleotide sequence of KHK_miR_{—}1194 of SEQ ID NO:1580.

### BEST MODE FOR CARRYING OUT THE INVENTION

[0112] As the nucleic acid in the present invention, the following nucleic acids can be mentioned. The nucleic acid is preferably a micro-RNA or a derivative thereof, a micro-RNA precursor or a derivative thereof, or a double-stranded nucleic acid (hereinafter also referred to as a nucleic acid of the present invention).
[0113] (1) A nucleic acid consisting of the nucleotide sequence of any one of SEQ ID NOs:1 to 1336.
[0114] (2) A nucleic acid consisting of a nucleotide sequence having an identity of 90% or more to the nucleotide sequence of any one of SEQ ID NOs:1 to 1336.
[0115] (3) A nucleic acid that hybridizes under stringent conditions with a strand complementary to a nucleic acid consisting of the nucleotide sequence of any one of SEQ ID NOs:1 to 1336.
[0116] (4) A nucleic acid comprising the nucleic acid described in any one of (1) to (3).
[0117] (5) A nucleic acid consisting of the nucleotide sequence of any one of SEQ ID NOs:1337 to 2851.
[0118] (6) A nucleic acid consisting of a nucleotide sequence having an identity of 80% or more to the nucleotide sequence of any one of SEQ ID NOs:1337 to 2851.
[0119] (7) A nucleic acid that hybridizes under stringent conditions with a strand complementary to a nucleic acid consisting of the nucleotide sequence of any one of SEQ ID NOs:1337 to 2851.
[0120] (8) A nucleic acid consisting of a nucleotide sequence complementary to the nucleic acid described in any one of (1) to (7).
[0121] (9) A double-stranded nucleic acid consisting of the nucleic acid described in any one of (1) to (7) and a nucleic acid consisting of a nucleotide sequence complementary to the nucleotide sequence of the nucleic acid.

[0122] In the present invention, a micro-RNA refers to an RNA that is a cell-derived single-stranded RNA, that has a sequence wherein the surrounding genome sequence, including the sequence, is capable of forming a hairpin structure, and that is capable of being cleaved out from either one chain of the hairpin. The length of the micro-RNA is preferably 15 to 28 nucleotides, more preferably 16 to 28 nucleotides, still more preferably 16 to 26 nucleotides, and particularly preferably 16 to 24 nucleotides. A micro-RNA complementarily binds to an mRNA being a target thereof, to degrade the mRNA or to suppress the translation of the mRNA, and to make post-transcriptional control of gene expression. As a micro-RNA of the present invention, a nucleic acid consisting of the nucleotide sequence of any one of SEQ ID NOs:1 to 1336, and a nucleic acid consisting of a nucleotide sequence having an identity of 90% or more, preferably 95% or more, to the nucleotide sequence of any one of SEQ ID NOs:1 to 1336 can be mentioned. A nucleic acid that hybridizes under stringent conditions with a strand complementary to a nucleic acid consisting of the nucleotide sequence of any one of SEQ ID NOs:1 to 1336 can also be mentioned. As another micro-RNA of the present invention, a nucleic acid comprising these nucleic acids can be mentioned.

[0123] In the present invention, a micro-RNA precursor is a nucleic acid, including a micro-RNA, that is about 50 to about 200 nucleotides, preferably about 70 to about 100 nucleotides, long, and that is capable of forming a hairpin structure. A micro-RNA is produced from a micro-RNA precursor via processing by a protein called Dicer. As micro-RNA precursors of the present invention, a nucleic acid consisting of the nucleotide sequence of any one of SEQ ID NOs:1337 to 2851, a nucleic acid consisting of a nucleotide sequence having an identity of 80% or more, preferably 90% or more, and still more preferably 95% or more, to the nucleotide sequence of any one of SEQ ID NOs:1337 to 2851, and a nucleic acid that hybridizes under stringent conditions with a strand complementary to a nucleic acid consisting of the nucleotide sequence of any one of SEQ ID NOs:1337 to 2851 can be mentioned. Because a micro-RNA precursor comprises a sequence of a micro-RNA, and it exhibits a function as a precursor if the micro-RNA is produced from the micro-RNA precursor via processing, any nucleic acid having a homology of 80% or more to the nucleotide sequence of any one of SEQ ID NOs:1337 to 2851 is thought to exhibit a function as a micro-RNA precursor.

[0124] Shown in Tables 1-1 to 1-40 are relationships between the nucleotide sequences of SEQ ID NOs:1 to 1336, specifically mentioned as micro-RNAs, and the nucleotide sequences of micro-RNA precursors mentioned as precursors thereof.

TABLE 1-1

| nucleic acid | | micro-RNA |
|---|---|---|
| name | micro-RNA | precursor |
| KHK_miR_1001 | SEQ ID NO: 1 | SEQ ID NO: 1337 |
| KHK_miR_1002 | SEQ ID NO: 2 | SEQ ID NO: 1338 |
| KHK_miR_1003 | SEQ ID NO: 3 | SEQ ID NO: 1339 |
| KHK_miR_1004 | SEQ ID NO: 4 | SEQ ID NO: 1340 |
| KHK_miR_1005 | SEQ ID NO: 5 | SEQ ID NO: 1341 |
| KHK_miR_1006 | SEQ ID NO: 6 | SEQ ID NO: 1342 |
| KHK_miR_1007 | SEQ ID NO: 7 | SEQ ID NO: 1343 |
| | | SEQ ID NO: 1344 |
| | | SEQ ID NO: 1345 |
| | | SEQ ID NO: 1346 |
| | | SEQ ID NO: 1347 |
| | | SEQ ID NO: 1348 |
| | | SEQ ID NO: 1349 |
| | | SEQ ID NO: 1350 |
| | | SEQ ID NO: 1351 |
| KHK_miR_1008 | SEQ ID NO: 8 | SEQ ID NO: 1352 |
| KHK_miR_1009 | SEQ ID NO: 9 | SEQ ID NO: 1353 |
| | | SEQ ID NO: 1354 |
| KHK_miR_1010 | SEQ ID NO: 10 | SEQ ID NO: 1355 |
| KHK_miR_1011 | SEQ ID NO: 11 | SEQ ID NO: 1356 |
| | | SEQ ID NO: 1357 |
| | | SEQ ID NO: 1358 |
| | | SEQ ID NO: 1359 |
| | | SEQ ID NO: 1360 |
| KHK_miR_1012 | SEQ ID NO: 12 | SEQ ID NO: 1361 |
| KHK_miR_1013 | SEQ ID NO: 13 | SEQ ID NO: 1362 |
| KHK_miR_1014 | SEQ ID NO: 14 | SEQ ID NO: 1363 |
| KHK_miR_1015 | SEQ ID NO: 15 | SEQ ID NO: 1364 |
| | | SEQ ID NO: 1365 |
| KHK_miR_1016 | SEQ ID NO: 16 | SEQ ID NO: 1366 |
| KHK_miR_1017 | SEQ ID NO: 17 | SEQ ID NO: 1367 |
| KHK_miR_1018 | SEQ ID NO: 18 | SEQ ID NO: 1368 |
| KHK_miR_1019 | SEQ ID NO: 19 | SEQ ID NO: 1369 |
| | | SEQ ID NO: 1370 |
| KHK_miR_1020 | SEQ ID NO: 20 | SEQ ID NO: 1371 |
| KHK_miR_1021 | SEQ ID NO: 21 | SEQ ID NO: 1372 |
| KHK_miR_1022 | SEQ ID NO: 22 | SEQ ID NO: 1373 |
| KHK_miR_1023 | SEQ ID NO: 23 | SEQ ID NO: 1374 |
| KHK_miR_1024 | SEQ ID NO: 24 | SEQ ID NO: 1375 |

TABLE 1-2

| nucleic acid | | micro-RNA |
|---|---|---|
| name | micro-RNA | precursor |
| | | SEQ ID NO: 1376 |
| KHK_miR_1025 | SEQ ID NO: 25 | SEQ ID NO: 1377 |
| KHK_miR_1026 | SEQ ID NO: 26 | SEQ ID NO: 1378 |
| KHK_miR_1027 | SEQ ID NO: 27 | SEQ ID NO: 1379 |
| | | SEQ ID NO: 1380 |
| | | SEQ ID NO: 1381 |
| KHK_miR_1028 | SEQ ID NO: 28 | SEQ ID NO: 1382 |
| KHK_miR_1029 | SEQ ID NO: 29 | SEQ ID NO: 1383 |
| KHK_miR_1030 | SEQ ID NO: 30 | SEQ ID NO: 1384 |
| KHK_miR_1031 | SEQ ID NO: 31 | SEQ ID NO: 1385 |
| KHK_miR_1032 | SEQ ID NO: 32 | SEQ ID NO: 1386 |
| KHK_miR_1033 | SEQ ID NO: 33 | SEQ ID NO: 1387 |
| KHK_miR_1034 | SEQ ID NO: 34 | SEQ ID NO: 1388 |
| KHK_miR_1035 | SEQ ID NO: 35 | SEQ ID NO: 1389 |
| KHK_miR_1036 | SEQ ID NO: 36 | SEQ ID NO: 1390 |
| KHK_miR_1037 | SEQ ID NO: 37 | SEQ ID NO: 1391 |
| KHK_miR_1038 | SEQ ID NO: 38 | SEQ ID NO: 1392 |
| KHK_miR_1039 | SEQ ID NO: 39 | SEQ ID NO: 1393 |
| KHK_miR_1040 | SEQ ID NO: 40 | SEQ ID NO: 1394 |
| KHK_miR_1041 | SEQ ID NO: 41 | SEQ ID NO: 1395 |
| KHK_miR_1042 | SEQ ID NO: 42 | SEQ ID NO: 1396 |
| KHK_miR_1043 | SEQ ID NO: 43 | SEQ ID NO: 1397 |
| KHK_miR_1044 | SEQ ID NO: 44 | SEQ ID NO: 1398 |
| KHK_miR_1045 | SEQ ID NO: 45 | SEQ ID NO: 1399 |
| KHK_miR_1046 | SEQ ID NO: 46 | SEQ ID NO: 1400 |
| KHK_miR_1047 | SEQ ID NO: 47 | SEQ ID NO: 1401 |
| KHK_miR_1048 | SEQ ID NO: 48 | SEQ ID NO: 1402 |
| | | SEQ ID NO: 1403 |
| KHK_miR_1049 | SEQ ID NO: 49 | SEQ ID NO: 1404 |
| | | SEQ ID NO: 1405 |
| KHK_miR_1050 | SEQ ID NO: 50 | SEQ ID NO: 1406 |
| KHK_miR_1051 | SEQ ID NO: 51 | SEQ ID NO: 1407 |
| KHK_miR_1052 | SEQ ID NO: 52 | SEQ ID NO: 1408 |
| KHK_miR_1053 | SEQ ID NO: 53 | SEQ ID NO: 1409 |
| KHK_miR_1054 | SEQ ID NO: 54 | SEQ ID NO: 1410 |
| KHK_miR_1055 | SEQ ID NO: 55 | SEQ ID NO: 1411 |
| KHK_miR_1056 | SEQ ID NO: 56 | SEQ ID NO: 1412 |
| KHK_miR_1057 | SEQ ID NO: 57 | SEQ ID NO: 1413 |
| KHK_miR_1058 | SEQ ID NO: 58 | SEQ ID NO: 1414 |

TABLE 1-3

| nucleic acid | | micro-RNA |
|---|---|---|
| name | micro-RNA | precursor |
| | | SEQ ID NO: 1415 |
| | | SEQ ID NO: 1416 |
| | | SEQ ID NO: 1417 |
| | | SEQ ID NO: 1418 |
| KHK_miR_1059 | SEQ ID NO: 59 | SEQ ID NO: 1419 |
| KHK_miR_1060 | SEQ ID NO: 60 | SEQ ID NO: 1420 |
| KHK_miR_1061 | SEQ ID NO: 61 | SEQ ID NO: 1421 |
| KHK_miR_1062 | SEQ ID NO: 62 | SEQ ID NO: 1422 |
| KHK_miR_1063 | SEQ ID NO: 63 | SEQ ID NO: 1423 |
| KHK_miR_1064 | SEQ ID NO: 64 | SEQ ID NO: 1424 |
| KHK_miR_1065 | SEQ ID NO: 65 | SEQ ID NO: 1425 |
| KHK_miR_1066 | SEQ ID NO: 66 | SEQ ID NO: 1426 |
| KHK_miR_1067 | SEQ ID NO: 67 | SEQ ID NO: 1427 |
| KHK_miR_1068 | SEQ ID NO: 68 | SEQ ID NO: 1428 |
| KHK_miR_1069 | SEQ ID NO: 69 | SEQ ID NO: 1429 |
| KHK_miR_1070 | SEQ ID NO: 70 | SEQ ID NO: 1430 |
| KHK_miR_1071 | SEQ ID NO: 71 | SEQ ID NO: 1431 |
| KHK_miR_1072 | SEQ ID NO: 72 | SEQ ID NO: 1432 |
| KHK_miR_1073 | SEQ ID NO: 73 | SEQ ID NO: 1433 |
| KHK_miR_1074 | SEQ ID NO: 74 | SEQ ID NO: 1434 |
| KHK_miR_1075 | SEQ ID NO: 75 | SEQ ID NO: 1435 |
| | | SEQ ID NO: 1436 |
| KHK_miR_1076 | SEQ ID NO: 76 | SEQ ID NO: 1437 |
| KHK_miR_1077 | SEQ ID NO: 77 | SEQ ID NO: 1438 |
| KHK_miR_1078 | SEQ ID NO: 78 | SEQ ID NO: 1439 |
| KHK_miR_1079 | SEQ ID NO: 79 | SEQ ID NO: 1440 |
| | | SEQ ID NO: 1441 |
| | | SEQ ID NO: 1442 |
| KHK_miR_1080 | SEQ ID NO: 80 | SEQ ID NO: 1443 |
| KHK_miR_1081 | SEQ ID NO: 81 | SEQ ID NO: 1444 |
| KHK_miR_1082 | SEQ ID NO: 82 | SEQ ID NO: 1445 |
| KHK_miR_1083 | SEQ ID NO: 83 | SEQ ID NO: 1446 |
| KHK_miR_1084 | SEQ ID NO: 84 | SEQ ID NO: 1447 |
| KHK_miR_1085 | SEQ ID NO: 85 | SEQ ID NO: 1448 |
| KHK_miR_1086 | SEQ ID NO: 86 | SEQ ID NO: 1449 |
| KHK_miR_1087 | SEQ ID NO: 87 | SEQ ID NO: 1450 |
| KHK_miR_1088 | SEQ ID NO: 88 | SEQ ID NO: 1451 |
| KHK_miR_1089 | SEQ ID NO: 89 | SEQ ID NO: 1452 |
| KHK_miR_1090 | SEQ ID NO: 90 | SEQ ID NO: 1453 |

TABLE 1-4

| nucleic acid | | micro-RNA |
|---|---|---|
| name | micro-RNA | precursor |
| KHK_miR_1091 | SEQ ID NO: 91 | SEQ ID NO: 1454 |
| KHK_miR_1092 | SEQ ID NO: 92 | SEQ ID NO: 1455 |
| KHK_miR_1093 | SEQ ID NO: 93 | SEQ ID NO: 1456 |
| | | SEQ ID NO: 1457 |
| | | SEQ ID NO: 1458 |
| | | SEQ ID NO: 1459 |
| KHK_miR_1094 | SEQ ID NO: 94 | SEQ ID NO: 1460 |
| KHK_miR_1095 | SEQ ID NO: 95 | SEQ ID NO: 1461 |
| KHK_miR_1096 | SEQ ID NO: 96 | SEQ ID NO: 1462 |
| KHK_miR_1097 | SEQ ID NO: 97 | SEQ ID NO: 1463 |
| KHK_miR_1098 | SEQ ID NO: 98 | SEQ ID NO: 1464 |
| KHK_miR_1099 | SEQ ID NO: 99 | SEQ ID NO: 1465 |
| KHK_miR_1100 | SEQ ID NO: 100 | SEQ ID NO: 1466 |
| KHK_miR_1101 | SEQ ID NO: 101 | SEQ ID NO: 1467 |
| KHK_miR_1102 | SEQ ID NO: 102 | SEQ ID NO: 1468 |
| KHK_miR_1103 | SEQ ID NO: 103 | SEQ ID NO: 1469 |
| KHK_miR_1104 | SEQ ID NO: 104 | SEQ ID NO: 1470 |
| | | SEQ ID NO: 1471 |
| KHK_miR_1105 | SEQ ID NO: 105 | SEQ ID NO: 1472 |
| KHK_miR_1106 | SEQ ID NO: 106 | SEQ ID NO: 1473 |
| KHK_miR_1107 | SEQ ID NO: 107 | SEQ ID NO: 1474 |
| KHK_miR_1108 | SEQ ID NO: 108 | SEQ ID NO: 1475 |
| KHK_miR_1109 | SEQ ID NO: 109 | SEQ ID NO: 1476 |
| KHK_miR_1110 | SEQ ID NO: 110 | SEQ ID NO: 1477 |
| KHK_miR_1111 | SEQ ID NO: 111 | SEQ ID NO: 1478 |
| KHK_miR_1112 | SEQ ID NO: 112 | SEQ ID NO: 1479 |
| | | SEQ ID NO: 1480 |
| KHK_miR_1113 | SEQ ID NO: 113 | SEQ ID NO: 1481 |
| KHK_miR_1114 | SEQ ID NO: 114 | SEQ ID NO: 1482 |
| KHK_miR_1115 | SEQ ID NO: 115 | SEQ ID NO: 1483 |
| KHK_miR_1116 | SEQ ID NO: 116 | SEQ ID NO: 1484 |
| KHK_miR_1117 | SEQ ID NO: 117 | SEQ ID NO: 1485 |
| KHK_miR_1118 | SEQ ID NO: 118 | SEQ ID NO: 1486 |
| KHK_miR_1119 | SEQ ID NO: 119 | SEQ ID NO: 1487 |
| KHK_miR_1120 | SEQ ID NO: 120 | SEQ ID NO: 1488 |
| KHK_miR_1121 | SEQ ID NO: 121 | SEQ ID NO: 1489 |
| KHK_miR_1122 | SEQ ID NO: 122 | SEQ ID NO: 1490 |
| KHK_miR_1123 | SEQ ID NO: 123 | SEQ ID NO: 1491 |
| KHK_miR_1124 | SEQ ID NO: 124 | SEQ ID NO: 1492 |

TABLE 1-5

| nucleic acid | | micro-RNA |
|---|---|---|
| name | micro-RNA | precursor |
| KHK_miR_1125 | SEQ ID NO: 125 | SEQ ID NO: 1493 |
| KHK_miR_1126 | SEQ ID NO: 126 | SEQ ID NO: 1494 |
| | | SEQ ID NO: 1495 |
| | | SEQ ID NO: 1496 |
| KHK_miR_1127 | SEQ ID NO: 127 | SEQ ID NO: 1497 |
| KHK_miR_1128 | SEQ ID NO: 128 | SEQ ID NO: 1498 |
| KHK_miR_1129 | SEQ ID NO: 129 | SEQ ID NO: 1499 |
| KHK_miR_1130 | SEQ ID NO: 130 | SEQ ID NO: 1500 |
| KHK_miR_1131 | SEQ ID NO: 131 | SEQ ID NO: 1501 |
| KHK_miR_1132 | SEQ ID NO: 132 | SEQ ID NO: 1502 |
| KHK_miR_1133 | SEQ ID NO: 133 | SEQ ID NO: 1503 |
| KHK_miR_1134 | SEQ ID NO: 134 | SEQ ID NO: 1504 |
| KHK_miR_1135 | SEQ ID NO: 135 | SEQ ID NO: 1505 |
| KHK_miR_1136 | SEQ ID NO: 136 | SEQ ID NO: 1506 |
| KHK_miR_1137 | SEQ ID NO: 137 | SEQ ID NO: 1507 |
| KHK_miR_1138 | SEQ ID NO: 138 | SEQ ID NO: 1508 |
| KHK_miR_1139 | SEQ ID NO: 139 | SEQ ID NO: 1509 |
| KHK_miR_1140 | SEQ ID NO: 140 | SEQ ID NO: 1510 |
| KHK_miR_1141 | SEQ ID NO: 141 | SEQ ID NO: 1511 |
| KHK_miR_1142 | SEQ ID NO: 142 | SEQ ID NO: 1512 |
| KHK_miR_1143 | SEQ ID NO: 143 | SEQ ID NO: 1513 |
| KHK_miR_1144 | SEQ ID NO: 144 | SEQ ID NO: 1514 |
| KHK_miR_1145 | SEQ ID NO: 145 | SEQ ID NO: 1515 |
| KHK_miR_1146 | SEQ ID NO: 146 | SEQ ID NO: 1516 |
| KHK_miR_1147 | SEQ ID NO: 147 | SEQ ID NO: 1517 |
| KHK_miR_1148 | SEQ ID NO: 148 | SEQ ID NO: 1518 |
| KHK_miR_1149 | SEQ ID NO: 149 | SEQ ID NO: 1519 |
| KHK_miR_1150 | SEQ ID NO: 150 | SEQ ID NO: 1520 |
| KHK_miR_1151 | SEQ ID NO: 151 | SEQ ID NO: 1521 |
| KHK_miR_1152 | SEQ ID NO: 152 | SEQ ID NO: 1522 |
| | | SEQ ID NO: 1523 |
| | | SEQ ID NO: 1524 |
| KHK_miR_1153 | SEQ ID NO: 153 | SEQ ID NO: 1525 |
| KHK_miR_1154 | SEQ ID NO: 154 | SEQ ID NO: 1526 |
| KHK_miR_1155 | SEQ ID NO: 155 | SEQ ID NO: 1527 |
| KHK_miR_1156 | SEQ ID NO: 156 | SEQ ID NO: 1528 |
| KHK_miR_1157 | SEQ ID NO: 157 | SEQ ID NO: 1529 |
| KHK_miR_1158 | SEQ ID NO: 158 | SEQ ID NO: 1530 |
| KHK_miR_1159 | SEQ ID NO: 159 | SEQ ID NO: 1531 |

TABLE 1-6

| nucleic acid | | micro-RNA |
|---|---|---|
| name | micro-RNA | precursor |
| KHK_miR_1160 | SEQ ID NO: 160 | SEQ ID NO: 1532 |
| KHK_miR_1161 | SEQ ID NO: 161 | SEQ ID NO: 1533 |
| KHK_miR_1162 | SEQ ID NO: 162 | SEQ ID NO: 1534 |
| KHK_miR_1163 | SEQ ID NO: 163 | SEQ ID NO: 1535 |
| KHK_miR_1164 | SEQ ID NO: 164 | SEQ ID NO: 1536 |
| KHK_miR_1165 | SEQ ID NO: 165 | SEQ ID NO: 1537 |
| KHK_miR_1166 | SEQ ID NO: 166 | SEQ ID NO: 1538 |
| KHK_miR_1167 | SEQ ID NO: 167 | SEQ ID NO: 1539 |
| KHK_miR_1168 | SEQ ID NO: 168 | SEQ ID NO: 1540 |
| KHK_miR_1169 | SEQ ID NO: 169 | SEQ ID NO: 1541 |
| KHK_miR_1170 | SEQ ID NO: 170 | SEQ ID NO: 1542 |
| KHK_miR_1171 | SEQ ID NO: 171 | SEQ ID NO: 1543 |
| KHK_miR_1172 | SEQ ID NO: 172 | SEQ ID NO: 1544 |
| KHK_miR_1173 | SEQ ID NO: 173 | SEQ ID NO: 1545 |
| KHK_miR_1174 | SEQ ID NO: 174 | SEQ ID NO: 1546 |
| KHK_miR_1175 | SEQ ID NO: 175 | SEQ ID NO: 1547 |
| KHK_miR_1176 | SEQ ID NO: 176 | SEQ ID NO: 1548 |
| KHK_miR_1177 | SEQ ID NO: 177 | SEQ ID NO: 1549 |
| KHK_miR_1178 | SEQ ID NO: 178 | SEQ ID NO: 1550 |
| | | SEQ ID NO: 1551 |
| | | SEQ ID NO: 1552 |
| | | SEQ ID NO: 1553 |
| | | SEQ ID NO: 1554 |
| | | SEQ ID NO: 1555 |
| KHK_miR_1179 | SEQ ID NO: 179 | SEQ ID NO: 1556 |
| KHK_miR_1180 | SEQ ID NO: 180 | SEQ ID NO: 1557 |
| KHK_miR_1181 | SEQ ID NO: 181 | SEQ ID NO: 1558 |
| | | SEQ ID NO: 1559 |
| KHK_miR_1182 | SEQ ID NO: 182 | SEQ ID NO: 1560 |
| KHK_miR_1183 | SEQ ID NO: 183 | SEQ ID NO: 1561 |
| KHK_miR_1184 | SEQ ID NO: 184 | SEQ ID NO: 1562 |
| KHK_miR_1185 | SEQ ID NO: 185 | SEQ ID NO: 1563 |
| KHK_miR_1186 | SEQ ID NO: 186 | SEQ ID NO: 1564 |
| KHK_miR_1187 | SEQ ID NO: 187 | SEQ ID NO: 1565 |
| KHK_miR_1188 | SEQ ID NO: 188 | SEQ ID NO: 1566 |
| KHK_miR_1189 | SEQ ID NO: 189 | SEQ ID NO: 1567 |
| KHK_miR_1190 | SEQ ID NO: 190 | SEQ ID NO: 1568 |
| KHK_miR_1191 | SEQ ID NO: 191 | SEQ ID NO: 1569 |
| KHK_miR_1192 | SEQ ID NO: 192 | SEQ ID NO: 1570 |

TABLE 1-7

| nucleic acid | | micro-RNA |
|---|---|---|
| name | micro-RNA | precursor |
| KHK_miR_1193 | SEQ ID NO: 193 | SEQ ID NO: 1571 |
| KHK_miR_1194 | SEQ ID NO: 194 | SEQ ID NO: 1572 |
| KHK_miR_1195 | SEQ ID NO: 195 | SEQ ID NO: 1573 |
| KHK_miR_1196 | SEQ ID NO: 196 | SEQ ID NO: 1574 |
| KHK_miR_1197 | SEQ ID NO: 197 | SEQ ID NO: 1575 |
| KHK_miR_1198 | SEQ ID NO: 198 | SEQ ID NO: 1576 |
| KHK_miR_1199 | SEQ ID NO: 199 | SEQ ID NO: 1577 |
| KHK_miR_1200 | SEQ ID NO: 200 | SEQ ID NO: 1578 |
| KHK_miR_1201 | SEQ ID NO: 201 | SEQ ID NO: 1579 |
| KHK_miR_1202 | SEQ ID NO: 202 | SEQ ID NO: 1580 |
| KHK_miR_1203 | SEQ ID NO: 203 | SEQ ID NO: 1581 |
| KHK_miR_1204 | SEQ ID NO: 204 | SEQ ID NO: 1582 |
| KHK_miR_1205 | SEQ ID NO: 205 | SEQ ID NO: 1583 |
| KHK_miR_1206 | SEQ ID NO: 206 | SEQ ID NO: 1584 |
| KHK_miR_1207 | SEQ ID NO: 207 | SEQ ID NO: 1585 |
| KHK_miR_1208 | SEQ ID NO: 208 | SEQ ID NO: 1586 |
| | | SEQ ID NO: 1587 |
| KHK_miR_1209 | SEQ ID NO: 209 | SEQ ID NO: 1588 |
| KHK_miR_1210 | SEQ ID NO: 210 | SEQ ID NO: 1589 |
| KHK_miR_1211 | SEQ ID NO: 211 | SEQ ID NO: 1590 |
| KHK_miR_1212 | SEQ ID NO: 212 | SEQ ID NO: 1591 |
| KHK_miR_1213 | SEQ ID NO: 213 | SEQ ID NO: 1592 |
| | | SEQ ID NO: 1593 |
| | | SEQ ID NO: 1594 |
| KHK_miR_1214 | SEQ ID NO: 214 | SEQ ID NO: 1595 |
| | | SEQ ID NO: 1596 |
| KHK_miR_1215 | SEQ ID NO: 215 | SEQ ID NO: 1597 |
| KHK_miR_1216 | SEQ ID NO: 216 | SEQ ID NO: 1598 |
| KHK_miR_1217 | SEQ ID NO: 217 | SEQ ID NO: 1599 |
| KHK_miR_1218 | SEQ ID NO: 218 | SEQ ID NO: 1600 |
| KHK_miR_1219 | SEQ ID NO: 219 | SEQ ID NO: 1601 |
| KHK_miR_1220 | SEQ ID NO: 220 | SEQ ID NO: 1602 |
| KHK_miR_1221 | SEQ ID NO: 221 | SEQ ID NO: 1603 |
| KHK_miR_1222 | SEQ ID NO: 222 | SEQ ID NO: 1604 |
| KHK_miR_1223 | SEQ ID NO: 223 | SEQ ID NO: 1605 |
| KHK_miR_1224 | SEQ ID NO: 224 | SEQ ID NO: 1606 |
| KHK_miR_1225 | SEQ ID NO: 225 | SEQ ID NO: 1607 |
| KHK_miR_1226 | SEQ ID NO: 226 | SEQ ID NO: 1608 |
| KHK_miR_1227 | SEQ ID NO: 227 | SEQ ID NO: 1609 |

TABLE 1-8

| nucleic acid | | micro-RNA |
|---|---|---|
| name | micro-RNA | precursor |
| KHK_miR_1228 | SEQ ID NO: 228 | SEQ ID NO: 1610 |
| KHK_miR_1229 | SEQ ID NO: 229 | SEQ ID NO: 1611 |
| KHK_miR_1230 | SEQ ID NO: 230 | SEQ ID NO: 1612 |
| KHK_miR_1231 | SEQ ID NO: 231 | SEQ ID NO: 1613 |
| KHK_miR_1232 | SEQ ID NO: 232 | SEQ ID NO: 1614 |
| KHK_miR_1233 | SEQ ID NO: 233 | SEQ ID NO: 1615 |
| | | SEQ ID NO: 1616 |
| | | SEQ ID NO: 1617 |
| | | SEQ ID NO: 1618 |
| KHK_miR_1234 | SEQ ID NO: 234 | SEQ ID NO: 1619 |
| KHK_miR_1235 | SEQ ID NO: 235 | SEQ ID NO: 1620 |
| KHK_miR_1236 | SEQ ID NO: 236 | SEQ ID NO: 1621 |
| KHK_miR_1237 | SEQ ID NO: 237 | SEQ ID NO: 1622 |
| KHK_miR_1238 | SEQ ID NO: 238 | SEQ ID NO: 1623 |
| KHK_miR_1239 | SEQ ID NO: 239 | SEQ ID NO: 1624 |
| KHK_miR_1240 | SEQ ID NO: 240 | SEQ ID NO: 1625 |
| KHK_miR_1241 | SEQ ID NO: 241 | SEQ ID NO: 1626 |
| | | SEQ ID NO: 1627 |
| KHK_miR_1242 | SEQ ID NO: 242 | SEQ ID NO: 1628 |
| KHK_miR_1243 | SEQ ID NO: 243 | SEQ ID NO: 1629 |
| KHK_miR_1244 | SEQ ID NO: 244 | SEQ ID NO: 1630 |
| KHK_miR_1245 | SEQ ID NO: 245 | SEQ ID NO: 1631 |
| KHK_miR_1246 | SEQ ID NO: 246 | SEQ ID NO: 1632 |
| KHK_miR_1247 | SEQ ID NO: 247 | SEQ ID NO: 1633 |
| KHK_miR_1248 | SEQ ID NO: 248 | SEQ ID NO: 1634 |
| KHK_miR_1249 | SEQ ID NO: 249 | SEQ ID NO: 1635 |
| KHK_miR_1250 | SEQ ID NO: 250 | SEQ ID NO: 1636 |
| KHK_miR_1251 | SEQ ID NO: 251 | SEQ ID NO: 1637 |
| KHK_miR_1252 | SEQ ID NO: 252 | SEQ ID NO: 1638 |
| | | SEQ ID NO: 1639 |
| KHK_miR_1253 | SEQ ID NO: 253 | SEQ ID NO: 1640 |
| KHK_miR_1254 | SEQ ID NO: 254 | SEQ ID NO: 1641 |
| KHK_miR_1255 | SEQ ID NO: 255 | SEQ ID NO: 1642 |
| | | SEQ ID NO: 1643 |
| | | SEQ ID NO: 1644 |
| KHK_miR_1256 | SEQ ID NO: 256 | SEQ ID NO: 1645 |
| KHK_miR_1257 | SEQ ID NO: 257 | SEQ ID NO: 1646 |
| KHK_miR_1258 | SEQ ID NO: 258 | SEQ ID NO: 1647 |
| | | SEQ ID NO: 1648 |

TABLE 1-9

| nucleic acid | | micro-RNA |
|---|---|---|
| name | micro-RNA | precursor |
| KHK_miR_1259 | SEQ ID NO: 259 | SEQ ID NO: 1649 |
| KHK_miR_1260 | SEQ ID NO: 260 | SEQ ID NO: 1650 |
| KHK_miR_1261 | SEQ ID NO: 261 | SEQ ID NO: 1651 |
| | | SEQ ID NO: 1652 |
| KHK_miR_1262 | SEQ ID NO: 262 | SEQ ID NO: 1653 |
| KHK_miR_1263 | SEQ ID NO: 263 | SEQ ID NO: 1654 |
| KHK_miR_1264 | SEQ ID NO: 264 | SEQ ID NO: 1655 |
| KHK_miR_1265 | SEQ ID NO: 265 | SEQ ID NO: 1656 |
| KHK_miR_1266 | SEQ ID NO: 266 | SEQ ID NO: 1657 |
| KHK_miR_1267 | SEQ ID NO: 267 | SEQ ID NO: 1658 |
| KHK_miR_1268 | SEQ ID NO: 268 | SEQ ID NO: 1659 |
| KHK_miR_1269 | SEQ ID NO: 269 | SEQ ID NO: 1660 |
| KHK_miR_1270 | SEQ ID NO: 270 | SEQ ID NO: 1661 |
| KHK_miR_1271 | SEQ ID NO: 271 | SEQ ID NO: 1662 |
| KHK_miR_1272 | SEQ ID NO: 272 | SEQ ID NO: 1663 |
| KHK_miR_1273 | SEQ ID NO: 273 | SEQ ID NO: 1664 |
| KHK_miR_1274 | SEQ ID NO: 274 | SEQ ID NO: 1665 |
| KHK_miR_1275 | SEQ ID NO: 275 | SEQ ID NO: 1666 |
| KHK_miR_1276 | SEQ ID NO: 276 | SEQ ID NO: 1667 |
| KHK_miR_1277 | SEQ ID NO: 277 | SEQ ID NO: 1668 |
| KHK_miR_1278 | SEQ ID NO: 278 | SEQ ID NO: 1669 |
| KHK_miR_1279 | SEQ ID NO: 279 | SEQ ID NO: 1670 |
| KHK_miR_1280 | SEQ ID NO: 280 | SEQ ID NO: 1671 |
| KHK_miR_1281 | SEQ ID NO: 281 | SEQ ID NO: 1672 |
| | | SEQ ID NO: 1673 |
| | | SEQ ID NO: 1674 |
| | | SEQ ID NO: 1675 |
| KHK_miR_1282 | SEQ ID NO: 282 | SEQ ID NO: 1676 |
| KHK_miR_1283 | SEQ ID NO: 283 | SEQ ID NO: 1677 |
| KHK_miR_1284 | SEQ ID NO: 284 | SEQ ID NO: 1678 |
| KHK_miR_1285 | SEQ ID NO: 285 | SEQ ID NO: 1679 |
| KHK_miR_1286 | SEQ ID NO: 286 | SEQ ID NO: 1680 |
| KHK_miR_1287 | SEQ ID NO: 287 | SEQ ID NO: 1681 |
| KHK_miR_1288 | SEQ ID NO: 288 | SEQ ID NO: 1682 |
| KHK_miR_1289 | SEQ ID NO: 289 | SEQ ID NO: 1683 |
| KHK_miR_1290 | SEQ ID NO: 290 | SEQ ID NO: 1684 |
| KHK_miR_1291 | SEQ ID NO: 291 | SEQ ID NO: 1685 |
| KHK_miR_1292 | SEQ ID NO: 292 | SEQ ID NO: 1686 |
| | | SEQ ID NO: 1687 |

TABLE 1-10

| nucleic acid | | micro-RNA |
|---|---|---|
| name | micro-RNA | precursor |
| KHK_miR_1293 | SEQ ID NO: 293 | SEQ ID NO: 1688 |
| KHK_miR_1294 | SEQ ID NO: 294 | SEQ ID NO: 1689 |
| KHK_miR_1295 | SEQ ID NO: 295 | SEQ ID NO: 1690 |
| KHK_miR_1296 | SEQ ID NO: 296 | SEQ ID NO: 1691 |
| KHK_miR_1297 | SEQ ID NO: 297 | SEQ ID NO: 1692 |
| KHK_miR_1298 | SEQ ID NO: 298 | SEQ ID NO: 1693 |
| KHK_miR_1299 | SEQ ID NO: 299 | SEQ ID NO: 1694 |
| KHK_miR_1300 | SEQ ID NO: 300 | SEQ ID NO: 1695 |
| KHK_miR_1301 | SEQ ID NO: 301 | SEQ ID NO: 1696 |
| KHK_miR_1302 | SEQ ID NO: 302 | SEQ ID NO: 1697 |
| KHK_miR_1303 | SEQ ID NO: 303 | SEQ ID NO: 1698 |
| KHK_miR_1304 | SEQ ID NO: 304 | SEQ ID NO: 1699 |
| KHK_miR_1305 | SEQ ID NO: 305 | SEQ ID NO: 1700 |
| KHK_miR_1306 | SEQ ID NO: 306 | SEQ ID NO: 1701 |
| KHK_miR_1307 | SEQ ID NO: 307 | SEQ ID NO: 1702 |
| KHK_miR_1308 | SEQ ID NO: 308 | SEQ ID NO: 1703 |
| | | SEQ ID NO: 1704 |
| | | SEQ ID NO: 1705 |
| KHK_miR_1309 | SEQ ID NO: 309 | SEQ ID NO: 1706 |
| | | SEQ ID NO: 1707 |
| KHK_miR_1310 | SEQ ID NO: 310 | SEQ ID NO: 1708 |
| KHK_miR_1311 | SEQ ID NO: 311 | SEQ ID NO: 1709 |
| KHK_miR_1312 | SEQ ID NO: 312 | SEQ ID NO: 1710 |
| KHK_miR_1313 | SEQ ID NO: 313 | SEQ ID NO: 1711 |
| KHK_miR_1314 | SEQ ID NO: 314 | SEQ ID NO: 1712 |
| KHK_miR_1315 | SEQ ID NO: 315 | SEQ ID NO: 1713 |
| | | SEQ ID NO: 1714 |
| KHK_miR_1316 | SEQ ID NO: 316 | SEQ ID NO: 1715 |
| KHK_miR_1317 | SEQ ID NO: 317 | SEQ ID NO: 1716 |
| KHK_miR_1318 | SEQ ID NO: 318 | SEQ ID NO: 1717 |
| KHK_miR_1319 | SEQ ID NO: 319 | SEQ ID NO: 1718 |
| KHK_miR_1320 | SEQ ID NO: 320 | SEQ ID NO: 1719 |
| KHK_miR_1321 | SEQ ID NO: 321 | SEQ ID NO: 1720 |
| KHK_miR_1322 | SEQ ID NO: 322 | SEQ ID NO: 1721 |
| KHK_miR_1323 | SEQ ID NO: 323 | SEQ ID NO: 1722 |
| KHK_miR_1324 | SEQ ID NO: 324 | SEQ ID NO: 1723 |
| KHK_miR_1325 | SEQ ID NO: 325 | SEQ ID NO: 1724 |
| KHK_miR_1326 | SEQ ID NO: 326 | SEQ ID NO: 1725 |
| | | SEQ ID NO: 1726 |

TABLE 1-11

| nucleic acid | | micro-RNA |
|---|---|---|
| name | micro-RNA | precursor |
| | | SEQ ID NO: 1727 |
| KHK_miR_1327 | SEQ ID NO: 327 | SEQ ID NO: 1728 |
| KHK_miR_1328 | SEQ ID NO: 328 | SEQ ID NO: 1729 |
| | | SEQ ID NO: 1730 |
| | | SEQ ID NO: 1731 |
| KHK_miR_1329 | SEQ ID NO: 329 | SEQ ID NO: 1732 |
| KHK_miR_1330 | SEQ ID NO: 330 | SEQ ID NO: 1733 |
| KHK_miR_1331 | SEQ ID NO: 331 | SEQ ID NO: 1734 |
| | | SEQ ID NO: 1735 |
| KHK_miR_1332 | SEQ ID NO: 332 | SEQ ID NO: 1736 |
| | | SEQ ID NO: 1737 |
| KHK_miR_1333 | SEQ ID NO: 333 | SEQ ID NO: 1738 |
| KHK_miR_1334 | SEQ ID NO: 334 | SEQ ID NO: 1739 |
| KHK_miR_1335 | SEQ ID NO: 335 | SEQ ID NO: 1740 |
| KHK_miR_1336 | SEQ ID NO: 336 | SEQ ID NO: 1741 |
| KHK_miR_1337 | SEQ ID NO: 337 | SEQ ID NO: 1742 |
| KHK_miR_1338 | SEQ ID NO: 338 | SEQ ID NO: 1743 |
| KHK_miR_1339 | SEQ ID NO: 339 | SEQ ID NO: 1744 |
| KHK_miR_1340 | SEQ ID NO: 340 | SEQ ID NO: 1745 |
| KHK_miR_1341 | SEQ ID NO: 341 | SEQ ID NO: 1746 |
| KHK_miR_1342 | SEQ ID NO: 342 | SEQ ID NO: 1747 |
| KHK_miR_1343 | SEQ ID NO: 343 | SEQ ID NO: 1748 |
| KHK_miR_1344 | SEQ ID NO: 344 | SEQ ID NO: 1749 |
| KHK_miR_1345 | SEQ ID NO: 345 | SEQ ID NO: 1750 |
| KHK_miR_1346 | SEQ ID NO: 346 | SEQ ID NO: 1751 |
| KHK_miR_1347 | SEQ ID NO: 347 | SEQ ID NO: 1752 |
| KHK_miR_1348 | SEQ ID NO: 348 | SEQ ID NO: 1753 |
| KHK_miR_1349 | SEQ ID NO: 349 | SEQ ID NO: 1754 |
| KHK_miR_1350 | SEQ ID NO: 350 | SEQ ID NO: 1755 |
| KHK_miR_1351 | SEQ ID NO: 351 | SEQ ID NO: 1756 |
| KHK_miR_1352 | SEQ ID NO: 352 | SEQ ID NO: 1757 |
| KHK_miR_1353 | SEQ ID NO: 353 | SEQ ID NO: 1758 |
| KHK_miR_1354 | SEQ ID NO: 354 | SEQ ID NO: 1759 |
| KHK_miR_1355 | SEQ ID NO: 355 | SEQ ID NO: 1760 |
| KHK_miR_1356 | SEQ ID NO: 356 | SEQ ID NO: 1761 |
| KHK_miR_1357 | SEQ ID NO: 357 | SEQ ID NO: 1762 |
| KHK_miR_1358 | SEQ ID NO: 358 | SEQ ID NO: 1763 |
| KHK_miR_1359 | SEQ ID NO: 359 | SEQ ID NO: 1764 |
| KHK_miR_1360 | SEQ ID NO: 360 | SEQ ID NO: 1765 |

TABLE 1-12

| nucleic acid | | micro-RNA |
|---|---|---|
| name | micro-RNA | precursor |
| | | SEQ ID NO: 1766 |
| | | SEQ ID NO: 1767 |
| KHK_miR_1361 | SEQ ID NO: 361 | SEQ ID NO: 1768 |
| KHK_miR_1362 | SEQ ID NO: 362 | SEQ ID NO: 1769 |
| KHK_miR_1363 | SEQ ID NO: 363 | SEQ ID NO: 1770 |
| | | SEQ ID NO: 1771 |
| KHK_miR_1364 | SEQ ID NO: 364 | SEQ ID NO: 1772 |
| | | SEQ ID NO: 1773 |
| | | SEQ ID NO: 1774 |
| | | SEQ ID NO: 1775 |
| | | SEQ ID NO: 1776 |
| | | SEQ ID NO: 1777 |
| KHK_miR_1365 | SEQ ID NO: 365 | SEQ ID NO: 1778 |
| KHK_miR_1366 | SEQ ID NO: 366 | SEQ ID NO: 1779 |
| KHK_miR_1367 | SEQ ID NO: 367 | SEQ ID NO: 1780 |
| KHK_miR_1368 | SEQ ID NO: 368 | SEQ ID NO: 1781 |
| KHK_miR_1369 | SEQ ID NO: 369 | SEQ ID NO: 1782 |
| KHK_miR_1370 | SEQ ID NO: 370 | SEQ ID NO: 1783 |
| KHK_miR_1371 | SEQ ID NO: 371 | SEQ ID NO: 1784 |
| KHK_miR_1372 | SEQ ID NO: 372 | SEQ ID NO: 1785 |
| KHK_miR_1373 | SEQ ID NO: 373 | SEQ ID NO: 1786 |
| KHK_miR_1374 | SEQ ID NO: 374 | SEQ ID NO: 1787 |
| KHK_miR_1375 | SEQ ID NO: 375 | SEQ ID NO: 1788 |
| KHK_miR_1376 | SEQ ID NO: 376 | SEQ ID NO: 1789 |
| KHK_miR_1377 | SEQ ID NO: 377 | SEQ ID NO: 1790 |
| KHK_miR_1378 | SEQ ID NO: 378 | SEQ ID NO: 1791 |
| KHK_miR_1379 | SEQ ID NO: 379 | SEQ ID NO: 1792 |
| | | SEQ ID NO: 1793 |
| KHK_miR_1380 | SEQ ID NO: 380 | SEQ ID NO: 1794 |
| KHK_miR_1381 | SEQ ID NO: 381 | SEQ ID NO: 1795 |
| KHK_miR_1382 | SEQ ID NO: 382 | SEQ ID NO: 1796 |
| KHK_miR_1383 | SEQ ID NO: 383 | SEQ ID NO: 1797 |
| KHK_miR_1384 | SEQ ID NO: 384 | SEQ ID NO: 1798 |
| KHK_miR_1385 | SEQ ID NO: 385 | SEQ ID NO: 1799 |
| KHK_miR_1386 | SEQ ID NO: 386 | SEQ ID NO: 1800 |
| KHK_miR_1387 | SEQ ID NO: 387 | SEQ ID NO: 1801 |
| KHK_miR_1388 | SEQ ID NO: 388 | SEQ ID NO: 1802 |
| KHK_miR_1389 | SEQ ID NO: 389 | SEQ ID NO: 1803 |
| KHK_miR_1390 | SEQ ID NO: 390 | SEQ ID NO: 1804 |

TABLE 1-13

| nucleic acid | | micro-RNA |
|---|---|---|
| name | micro-RNA | precursor |
| KHK_miR_1391 | SEQ ID NO: 391 | SEQ ID NO: 1805 |
| KHK_miR_1392 | SEQ ID NO: 392 | SEQ ID NO: 1806 |
| KHK_miR_1393 | SEQ ID NO: 393 | SEQ ID NO: 1807 |
| KHK_miR_1394 | SEQ ID NO: 394 | SEQ ID NO: 1808 |
| KHK_miR_1395 | SEQ ID NO: 395 | SEQ ID NO: 1809 |
| KHK_miR_1396 | SEQ ID NO: 396 | SEQ ID NO: 1810 |
| KHK_miR_1397 | SEQ ID NO: 397 | SEQ ID NO: 1811 |
| KHK_miR_1398 | SEQ ID NO: 398 | SEQ ID NO: 1812 |
| | | SEQ ID NO: 1813 |
| KHK_miR_1399 | SEQ ID NO: 399 | SEQ ID NO: 1814 |
| KHK_miR_1400 | SEQ ID NO: 400 | SEQ ID NO: 1815 |
| KHK_miR_1401 | SEQ ID NO: 401 | SEQ ID NO: 1816 |
| KHK_miR_1402 | SEQ ID NO: 402 | SEQ ID NO: 1817 |
| KHK_miR_1403 | SEQ ID NO: 403 | SEQ ID NO: 1818 |
| KHK_miR_1404 | SEQ ID NO: 404 | SEQ ID NO: 1819 |
| KHK_miR_1405 | SEQ ID NO: 405 | SEQ ID NO: 1820 |
| KHK_miR_1406 | SEQ ID NO: 406 | SEQ ID NO: 1821 |
| KHK_miR_1407 | SEQ ID NO: 407 | SEQ ID NO: 1822 |
| KHK_miR_1408 | SEQ ID NO: 408 | SEQ ID NO: 1823 |
| KHK_miR_1409 | SEQ ID NO: 409 | SEQ ID NO: 1824 |
| KHK_miR_1410 | SEQ ID NO: 410 | SEQ ID NO: 1825 |
| KHK_miR_1411 | SEQ ID NO: 411 | SEQ ID NO: 1826 |
| KHK_miR_1412 | SEQ ID NO: 412 | SEQ ID NO: 1827 |
| | | SEQ ID NO: 1828 |
| KHK_miR_1413 | SEQ ID NO: 413 | SEQ ID NO: 1829 |
| KHK_miR_1414 | SEQ ID NO: 414 | SEQ ID NO: 1830 |
| KHK_miR_1415 | SEQ ID NO: 415 | SEQ ID NO: 1831 |
| KHK_miR_1416 | SEQ ID NO: 416 | SEQ ID NO: 1832 |
| KHK_miR_1417 | SEQ ID NO: 417 | SEQ ID NO: 1833 |
| KHK_miR_1418 | SEQ ID NO: 418 | SEQ ID NO: 1834 |
| KHK_miR_1419 | SEQ ID NO: 419 | SEQ ID NO: 1835 |
| KHK_miR_1420 | SEQ ID NO: 420 | SEQ ID NO: 1836 |
| KHK_miR_1421 | SEQ ID NO: 421 | SEQ ID NO: 1837 |
| | | SEQ ID NO: 1838 |
| KHK_miR_1422 | SEQ ID NO: 422 | SEQ ID NO: 1839 |
| KHK_miR_1423 | SEQ ID NO: 423 | SEQ ID NO: 1840 |
| KHK_miR_1424 | SEQ ID NO: 424 | SEQ ID NO: 1841 |
| KHK_miR_1425 | SEQ ID NO: 425 | SEQ ID NO: 1842 |
| | | SEQ ID NO: 1843 |

TABLE 1-14

| nucleic acid | | micro-RNA |
|---|---|---|
| name | micro-RNA | precursor |
| KHK_miR_1426 | SEQ ID NO: 426 | SEQ ID NO: 1844 |
| KHK_miR_1427 | SEQ ID NO: 427 | SEQ ID NO: 1845 |
| KHK_miR_1428 | SEQ ID NO: 428 | SEQ ID NO: 1846 |
| KHK_miR_1429 | SEQ ID NO: 429 | SEQ ID NO: 1847 |
| KHK_miR_1430 | SEQ ID NO: 430 | SEQ ID NO: 1848 |
| KHK_miR_1431 | SEQ ID NO: 431 | SEQ ID NO: 1849 |
| | | SEQ ID NO: 1850 |
| KHK_miR_1432 | SEQ ID NO: 432 | SEQ ID NO: 1851 |
| KHK_miR_1433 | SEQ ID NO: 433 | SEQ ID NO: 1852 |
| KHK_miR_1434 | SEQ ID NO: 434 | SEQ ID NO: 1853 |
| KHK_miR_1435 | SEQ ID NO: 435 | SEQ ID NO: 1854 |
| KHK_miR_1436 | SEQ ID NO: 436 | SEQ ID NO: 1855 |
| KHK_miR_1437 | SEQ ID NO: 437 | SEQ ID NO: 1856 |
| KHK_miR_1438 | SEQ ID NO: 438 | SEQ ID NO: 1857 |
| KHK_miR_1439 | SEQ ID NO: 439 | SEQ ID NO: 1858 |
| KHK_miR_1440 | SEQ ID NO: 440 | SEQ ID NO: 1859 |
| KHK_miR_1441 | SEQ ID NO: 441 | SEQ ID NO: 1860 |
| KHK_miR_1442 | SEQ ID NO: 442 | SEQ ID NO: 1861 |
| KHK_miR_1443 | SEQ ID NO: 443 | SEQ ID NO: 1862 |
| KHK_miR_1444 | SEQ ID NO: 444 | SEQ ID NO: 1863 |
| KHK_miR_1445 | SEQ ID NO: 445 | SEQ ID NO: 1864 |
| KHK_miR_1446 | SEQ ID NO: 446 | SEQ ID NO: 1865 |
| | | SEQ ID NO: 1866 |
| KHK_miR_1447 | SEQ ID NO: 447 | SEQ ID NO: 1867 |
| KHK_miR_1448 | SEQ ID NO: 448 | SEQ ID NO: 1868 |
| KHK_miR_1449 | SEQ ID NO: 449 | SEQ ID NO: 1869 |
| KHK_miR_1450 | SEQ ID NO: 450 | SEQ ID NO: 1870 |
| KHK_miR_1451 | SEQ ID NO: 451 | SEQ ID NO: 1871 |
| KHK_miR_1452 | SEQ ID NO: 452 | SEQ ID NO: 1872 |
| KHK_miR_1453 | SEQ ID NO: 453 | SEQ ID NO: 1873 |
| KHK_miR_1454 | SEQ ID NO: 454 | SEQ ID NO: 1874 |
| KHK_miR_1455 | SEQ ID NO: 455 | SEQ ID NO: 1875 |
| KHK_miR_1456 | SEQ ID NO: 456 | SEQ ID NO: 1876 |
| KHK_miR_1457 | SEQ ID NO: 457 | SEQ ID NO: 1877 |
| KHK_miR_1458 | SEQ ID NO: 458 | SEQ ID NO: 1878 |
| KHK_miR_1459 | SEQ ID NO: 459 | SEQ ID NO: 1879 |
| KHK_miR_1460 | SEQ ID NO: 460 | SEQ ID NO: 1880 |
| KHK_miR_1461 | SEQ ID NO: 461 | SEQ ID NO: 1881 |
| KHK_miR_1462 | SEQ ID NO: 462 | SEQ ID NO: 1882 |

TABLE 1-15

| nucleic acid | | micro-RNA |
|---|---|---|
| name | micro-RNA | precursor |
| KHK_miR_1463 | SEQ ID NO: 463 | SEQ ID NO: 1883 |
| KHK_miR_1464 | SEQ ID NO: 464 | SEQ ID NO: 1884 |
| KHK_miR_1465 | SEQ ID NO: 465 | SEQ ID NO: 1885 |
| KHK_miR_1466 | SEQ ID NO: 466 | SEQ ID NO: 1886 |
| KHK_miR_1467 | SEQ ID NO: 467 | SEQ ID NO: 1887 |
| KHK_miR_1468 | SEQ ID NO: 468 | SEQ ID NO: 1888 |
| KHK_miR_1469 | SEQ ID NO: 469 | SEQ ID NO: 1889 |
| KHK_miR_1470 | SEQ ID NO: 470 | SEQ ID NO: 1890 |
| KHK_miR_1471 | SEQ ID NO: 471 | SEQ ID NO: 1891 |
| KHK_miR_1472 | SEQ ID NO: 472 | SEQ ID NO: 1892 |
| KHK_miR_1473 | SEQ ID NO: 473 | SEQ ID NO: 1893 |
| KHK_miR_1474 | SEQ ID NO: 474 | SEQ ID NO: 1894 |
| KHK_miR_1475 | SEQ ID NO: 475 | SEQ ID NO: 1895 |
| KHK_miR_1476 | SEQ ID NO: 476 | SEQ ID NO: 1896 |
| KHK_miR_1477 | SEQ ID NO: 477 | SEQ ID NO: 1897 |
| KHK_miR_1478 | SEQ ID NO: 478 | SEQ ID NO: 1898 |
| KHK_miR_1479 | SEQ ID NO: 479 | SEQ ID NO: 1899 |
| KHK_miR_1480 | SEQ ID NO: 480 | SEQ ID NO: 1900 |
| KHK_miR_1481 | SEQ ID NO: 481 | SEQ ID NO: 1901 |
| KHK_miR_1482 | SEQ ID NO: 482 | SEQ ID NO: 1902 |
| KHK_miR_1483 | SEQ ID NO: 483 | SEQ ID NO: 1903 |
| KHK_miR_1484 | SEQ ID NO: 484 | SEQ ID NO: 1904 |
| KHK_miR_1485 | SEQ ID NO: 485 | SEQ ID NO: 1905 |
| KHK_miR_1486 | SEQ ID NO: 486 | SEQ ID NO: 1906 |
| KHK_miR_1487 | SEQ ID NO: 487 | SEQ ID NO: 1907 |
| KHK_miR_1488 | SEQ ID NO: 488 | SEQ ID NO: 1908 |
| KHK_miR_1489 | SEQ ID NO: 489 | SEQ ID NO: 1909 |
| KHK_miR_1490 | SEQ ID NO: 490 | SEQ ID NO: 1910 |
| KHK_miR_1491 | SEQ ID NO: 491 | SEQ ID NO: 1911 |
| KHK_miR_1492 | SEQ ID NO: 492 | SEQ ID NO: 1912 |
| KHK_miR_1493 | SEQ ID NO: 493 | SEQ ID NO: 1913 |
| KHK_miR_1494 | SEQ ID NO: 494 | SEQ ID NO: 1914 |
| KHK_miR_1495 | SEQ ID NO: 495 | SEQ ID NO: 1915 |
| KHK_miR_1496 | SEQ ID NO: 496 | SEQ ID NO: 1916 |
| KHK_miR_1497 | SEQ ID NO: 497 | SEQ ID NO: 1917 |
| KHK_miR_1498 | SEQ ID NO: 498 | SEQ ID NO: 1918 |
| KHK_miR_1499 | SEQ ID NO: 499 | SEQ ID NO: 1919 |
| | | SEQ ID NO: 1920 |
| | | SEQ ID NO: 1921 |

TABLE 1-16

| nucleic acid | | micro-RNA |
|---|---|---|
| name | micro-RNA | precursor |
| KHK_miR_1500 | SEQ ID NO: 500 | SEQ ID NO: 1922 |
| KHK_miR_1501 | SEQ ID NO: 501 | SEQ ID NO: 1923 |
| KHK_miR_1502 | SEQ ID NO: 502 | SEQ ID NO: 1924 |
| KHK_miR_1503 | SEQ ID NO: 503 | SEQ ID NO: 1925 |
| KHK_miR_1504 | SEQ ID NO: 504 | SEQ ID NO: 1926 |
| KHK_miR_1505 | SEQ ID NO: 505 | SEQ ID NO: 1927 |
| KHK_miR_1506 | SEQ ID NO: 506 | SEQ ID NO: 1928 |
| KHK_miR_1507 | SEQ ID NO: 507 | SEQ ID NO: 1929 |
| | | SEQ ID NO: 1930 |
| KHK_miR_1508 | SEQ ID NO: 508 | SEQ ID NO: 1931 |
| | | SEQ ID NO: 1932 |
| KHK_miR_1509 | SEQ ID NO: 509 | SEQ ID NO: 1933 |
| KHK_miR_1510 | SEQ ID NO: 510 | SEQ ID NO: 1934 |
| KHK_miR_1511 | SEQ ID NO: 511 | SEQ ID NO: 1935 |
| KHK_miR_1512 | SEQ ID NO: 512 | SEQ ID NO: 1936 |
| KHK_miR_1513 | SEQ ID NO: 513 | SEQ ID NO: 1937 |
| KHK_miR_1514 | SEQ ID NO: 514 | SEQ ID NO: 1938 |
| KHK_miR_1515 | SEQ ID NO: 515 | SEQ ID NO: 1939 |
| KHK_miR_1516 | SEQ ID NO: 516 | SEQ ID NO: 1940 |
| KHK_miR_1517 | SEQ ID NO: 517 | SEQ ID NO: 1941 |
| KHK_miR_1518 | SEQ ID NO: 518 | SEQ ID NO: 1942 |
| KHK_miR_1519 | SEQ ID NO: 519 | SEQ ID NO: 1943 |
| | | SEQ ID NO: 1944 |
| KHK_miR_1520 | SEQ ID NO: 520 | SEQ ID NO: 1945 |
| KHK_miR_1521 | SEQ ID NO: 521 | SEQ ID NO: 1946 |
| KHK_miR_1522 | SEQ ID NO: 522 | SEQ ID NO: 1947 |
| KHK_miR_1523 | SEQ ID NO: 523 | SEQ ID NO: 1948 |
| KHK_miR_1524 | SEQ ID NO: 524 | SEQ ID NO: 1949 |
| KHK_miR_1525 | SEQ ID NO: 525 | SEQ ID NO: 1950 |
| KHK_miR_1526 | SEQ ID NO: 526 | SEQ ID NO: 1951 |
| KHK_miR_1527 | SEQ ID NO: 527 | SEQ ID NO: 1952 |
| KHK_miR_1528 | SEQ ID NO: 528 | SEQ ID NO: 1953 |
| KHK_miR_1529 | SEQ ID NO: 529 | SEQ ID NO: 1954 |
| KHK_miR_1530 | SEQ ID NO: 530 | SEQ ID NO: 1955 |
| KHK_miR_1531 | SEQ ID NO: 531 | SEQ ID NO: 1956 |
| KHK_miR_1532 | SEQ ID NO: 532 | SEQ ID NO: 1957 |
| | | SEQ ID NO: 1958 |
| KHK_miR_1533 | SEQ ID NO: 533 | SEQ ID NO: 1959 |
| KHK_miR_1534 | SEQ ID NO: 534 | SEQ ID NO: 1960 |

TABLE 1-17

| nucleic acid | | micro-RNA |
|---|---|---|
| name | micro-RNA | precursor |
| KHK_miR_1535 | SEQ ID NO: 535 | SEQ ID NO: 1961 |
| KHK_miR_1536 | SEQ ID NO: 536 | SEQ ID NO: 1962 |
| KHK_miR_1537 | SEQ ID NO: 537 | SEQ ID NO: 1963 |
| KHK_miR_1538 | SEQ ID NO: 538 | SEQ ID NO: 1964 |
| KHK_miR_1539 | SEQ ID NO: 539 | SEQ ID NO: 1965 |
| KHK_miR_1540 | SEQ ID NO: 540 | SEQ ID NO: 1966 |
| KHK_miR_1541 | SEQ ID NO: 541 | SEQ ID NO: 1967 |
| KHK_miR_1542 | SEQ ID NO: 542 | SEQ ID NO: 1968 |
| KHK_miR_1543 | SEQ ID NO: 543 | SEQ ID NO: 1969 |
| KHK_miR_1544 | SEQ ID NO: 544 | SEQ ID NO: 1970 |
| KHK_miR_1545 | SEQ ID NO: 545 | SEQ ID NO: 1971 |
| KHK_miR_1546 | SEQ ID NO: 546 | SEQ ID NO: 1972 |
| KHK_miR_1547 | SEQ ID NO: 547 | SEQ ID NO: 1973 |
| KHK_miR_1548 | SEQ ID NO: 548 | SEQ ID NO: 1974 |
| KHK_miR_1549 | SEQ ID NO: 549 | SEQ ID NO: 1975 |
| KHK_miR_1550 | SEQ ID NO: 550 | SEQ ID NO: 1976 |
| KHK_miR_1551 | SEQ ID NO: 551 | SEQ ID NO: 1977 |
| KHK_miR_1552 | SEQ ID NO: 552 | SEQ ID NO: 1978 |
| KHK_miR_1553 | SEQ ID NO: 553 | SEQ ID NO: 1979 |
| KHK_miR_1554 | SEQ ID NO: 554 | SEQ ID NO: 1980 |
| KHK_miR_1555 | SEQ ID NO: 555 | SEQ ID NO: 1981 |
| KHK_miR_1556 | SEQ ID NO: 556 | SEQ ID NO: 1982 |
| KHK_miR_1557 | SEQ ID NO: 557 | SEQ ID NO: 1983 |
| | | SEQ ID NO: 1984 |
| KHK_miR_1558 | SEQ ID NO: 558 | SEQ ID NO: 1985 |
| KHK_miR_1559 | SEQ ID NO: 559 | SEQ ID NO: 1986 |
| KHK_miR_1560 | SEQ ID NO: 560 | SEQ ID NO: 1987 |
| KHK_miR_1561 | SEQ ID NO: 561 | SEQ ID NO: 1988 |
| KHK_miR_1562 | SEQ ID NO: 562 | SEQ ID NO: 1989 |
| KHK_miR_1563 | SEQ ID NO: 563 | SEQ ID NO: 1990 |
| KHK_miR_1564 | SEQ ID NO: 564 | SEQ ID NO: 1991 |
| KHK_miR_1565 | SEQ ID NO: 565 | SEQ ID NO: 1992 |
| KHK_miR_1566 | SEQ ID NO: 566 | SEQ ID NO: 1993 |
| KHK_miR_1567 | SEQ ID NO: 567 | SEQ ID NO: 1994 |
| KHK_miR_1568 | SEQ ID NO: 568 | SEQ ID NO: 1995 |
| | | SEQ ID NO: 1996 |
| | | SEQ ID NO: 1997 |
| KHK_miR_1569 | SEQ ID NO: 569 | SEQ ID NO: 1998 |
| KHK_miR_1570 | SEQ ID NO: 570 | SEQ ID NO: 1999 |

TABLE 1-18

| nucleic acid | | micro-RNA |
|---|---|---|
| name | micro-RNA | precursor |
| KHK_miR_1571 | SEQ ID NO: 571 | SEQ ID NO: 2000 |
| KHK_miR_1572 | SEQ ID NO: 572 | SEQ ID NO: 2001 |
| KHK_miR_1573 | SEQ ID NO: 573 | SEQ ID NO: 2002 |
| KHK_miR_1574 | SEQ ID NO: 574 | SEQ ID NO: 2003 |
| KHK_miR_1575 | SEQ ID NO: 575 | SEQ ID NO: 2004 |
| KHK_miR_1576 | SEQ ID NO: 576 | SEQ ID NO: 2005 |
| | | SEQ ID NO: 2006 |
| | | SEQ ID NO: 2007 |
| | | SEQ ID NO: 2008 |
| | | SEQ ID NO: 2009 |
| KHK_miR_1577 | SEQ ID NO: 577 | SEQ ID NO: 2010 |
| KHK_miR_1578 | SEQ ID NO: 578 | SEQ ID NO: 2011 |
| KHK_miR_1579 | SEQ ID NO: 579 | SEQ ID NO: 2012 |
| KHK_miR_1580 | SEQ ID NO: 580 | SEQ ID NO: 2013 |
| KHK_miR_1581 | SEQ ID NO: 581 | SEQ ID NO: 2014 |
| KHK_miR_1582 | SEQ ID NO: 582 | SEQ ID NO: 2015 |
| KHK_miR_1583 | SEQ ID NO: 583 | SEQ ID NO: 2016 |
| | | SEQ ID NO: 2017 |
| | | SEQ ID NO: 2018 |
| KHK_miR_1584 | SEQ ID NO: 584 | SEQ ID NO: 2019 |
| KHK_miR_1585 | SEQ ID NO: 585 | SEQ ID NO: 2020 |
| KHK_miR_1586 | SEQ ID NO: 586 | SEQ ID NO: 2021 |
| KHK_miR_1587 | SEQ ID NO: 587 | SEQ ID NO: 2022 |
| KHK_miR_1588 | SEQ ID NO: 588 | SEQ ID NO: 2023 |
| KHK_miR_1589 | SEQ ID NO: 589 | SEQ ID NO: 2024 |
| KHK_miR_1590 | SEQ ID NO: 590 | SEQ ID NO: 2025 |
| KHK_miR_1591 | SEQ ID NO: 591 | SEQ ID NO: 2026 |
| KHK_miR_1592 | SEQ ID NO: 592 | SEQ ID NO: 2027 |
| KHK_miR_1593 | SEQ ID NO: 593 | SEQ ID NO: 2028 |
| KHK_miR_1594 | SEQ ID NO: 594 | SEQ ID NO: 2029 |
| KHK_miR_1595 | SEQ ID NO: 595 | SEQ ID NO: 2030 |
| KHK_miR_1596 | SEQ ID NO: 596 | SEQ ID NO: 2031 |
| KHK_miR_1597 | SEQ ID NO: 597 | SEQ ID NO: 2032 |
| KHK_miR_1598 | SEQ ID NO: 598 | SEQ ID NO: 2033 |
| KHK_miR_1599 | SEQ ID NO: 599 | SEQ ID NO: 2034 |
| KHK_miR_1600 | SEQ ID NO: 600 | SEQ ID NO: 2035 |
| | | SEQ ID NO: 2036 |
| | | SEQ ID NO: 2037 |
| KHK_miR_1601 | SEQ ID NO: 601 | SEQ ID NO: 2038 |

TABLE 1-19

| nucleic acid | | micro-RNA |
|---|---|---|
| name | micro-RNA | precursor |
| KHK_miR_1602 | SEQ ID NO: 602 | SEQ ID NO: 2039 |
| KHK_miR_1603 | SEQ ID NO: 603 | SEQ ID NO: 2040 |
| KHK_miR_1604 | SEQ ID NO: 604 | SEQ ID NO: 2041 |
| KHK_miR_1605 | SEQ ID NO: 605 | SEQ ID NO: 2042 |
| KHK_miR_1606 | SEQ ID NO: 606 | SEQ ID NO: 2043 |
| KHK_miR_1607 | SEQ ID NO: 607 | SEQ ID NO: 2044 |
| KHK_miR_1608 | SEQ ID NO: 608 | SEQ ID NO: 2045 |
| KHK_miR_1609 | SEQ ID NO: 609 | SEQ ID NO: 2046 |
| KHK_miR_1610 | SEQ ID NO: 610 | SEQ ID NO: 2047 |
| KHK_miR_1611 | SEQ ID NO: 611 | SEQ ID NO: 2048 |
| KHK_miR_1612 | SEQ ID NO: 612 | SEQ ID NO: 2049 |
| KHK_miR_1613 | SEQ ID NO: 613 | SEQ ID NO: 2050 |
| KHK_miR_1614 | SEQ ID NO: 614 | SEQ ID NO: 2051 |
| KHK_miR_1615 | SEQ ID NO: 615 | SEQ ID NO: 2052 |
| KHK_miR_1616 | SEQ ID NO: 616 | SEQ ID NO: 2053 |
| KHK_miR_1617 | SEQ ID NO: 617 | SEQ ID NO: 2054 |
| KHK_miR_1618 | SEQ ID NO: 618 | SEQ ID NO: 2055 |
| KHK_miR_1619 | SEQ ID NO: 619 | SEQ ID NO: 2056 |
| KHK_miR_1620 | SEQ ID NO: 620 | SEQ ID NO: 2057 |
| KHK_miR_1621 | SEQ ID NO: 621 | SEQ ID NO: 2058 |
| KHK_miR_1622 | SEQ ID NO: 622 | SEQ ID NO: 2059 |
| KHK_miR_1623 | SEQ ID NO: 623 | SEQ ID NO: 2060 |
| KHK_miR_1624 | SEQ ID NO: 624 | SEQ ID NO: 2061 |
| KHK_miR_1625 | SEQ ID NO: 625 | SEQ ID NO: 2062 |
| KHK_miR_1626 | SEQ ID NO: 626 | SEQ ID NO: 2063 |
| KHK_miR_1627 | SEQ ID NO: 627 | SEQ ID NO: 2064 |
| KHK_miR_1628 | SEQ ID NO: 628 | SEQ ID NO: 2065 |
| KHK_miR_1629 | SEQ ID NO: 629 | SEQ ID NO: 2066 |
| KHK_miR_1630 | SEQ ID NO: 630 | SEQ ID NO: 2067 |
| KHK_miR_1631 | SEQ ID NO: 631 | SEQ ID NO: 2068 |
| KHK_miR_1632 | SEQ ID NO: 632 | SEQ ID NO: 2069 |
| KHK_miR_1633 | SEQ ID NO: 633 | SEQ ID NO: 2070 |
| KHK_miR_1634 | SEQ ID NO: 634 | SEQ ID NO: 2071 |
| KHK_miR_1635 | SEQ ID NO: 635 | SEQ ID NO: 2072 |
| KHK_miR_1636 | SEQ ID NO: 636 | SEQ ID NO: 2073 |
| KHK_miR_1637 | SEQ ID NO: 637 | SEQ ID NO: 2074 |
| KHK_miR_1638 | SEQ ID NO: 638 | SEQ ID NO: 2075 |
| | | SEQ ID NO: 2076 |
| | | SEQ ID NO: 2077 |

TABLE 1-20

| nucleic acid | | micro-RNA |
|---|---|---|
| name | micro-RNA | precursor |
| | | SEQ ID NO: 2078 |
| KHK_miR_1639 | SEQ ID NO: 639 | SEQ ID NO: 2079 |
| KHK_miR_1640 | SEQ ID NO: 640 | SEQ ID NO: 2080 |
| KHK_miR_1641 | SEQ ID NO: 641 | SEQ ID NO: 2081 |
| KHK_miR_1642 | SEQ ID NO: 642 | SEQ ID NO: 2082 |
| | | SEQ ID NO: 2083 |
| KHK_miR_1643 | SEQ ID NO: 643 | SEQ ID NO: 2084 |
| KHK_miR_1644 | SEQ ID NO: 644 | SEQ ID NO: 2085 |
| KHK_miR_1645 | SEQ ID NO: 645 | SEQ ID NO: 2086 |
| KHK_miR_1646 | SEQ ID NO: 646 | SEQ ID NO: 2087 |
| KHK_miR_1647 | SEQ ID NO: 647 | SEQ ID NO: 2088 |
| KHK_miR_1648 | SEQ ID NO: 648 | SEQ ID NO: 2089 |
| KHK_miR_1649 | SEQ ID NO: 649 | SEQ ID NO: 2090 |
| KHK_miR_1650 | SEQ ID NO: 650 | SEQ ID NO: 2091 |
| KHK_miR_1651 | SEQ ID NO: 651 | SEQ ID NO: 2092 |
| KHK_miR_1652 | SEQ ID NO: 652 | SEQ ID NO: 2093 |
| KHK_miR_1653 | SEQ ID NO: 653 | SEQ ID NO: 2094 |
| | | SEQ ID NO: 2095 |
| KHK_miR_1654 | SEQ ID NO: 654 | SEQ ID NO: 2096 |
| KHK_miR_1655 | SEQ ID NO: 655 | SEQ ID NO: 2097 |
| KHK_miR_1656 | SEQ ID NO: 656 | SEQ ID NO: 2098 |
| KHK_miR_1657 | SEQ ID NO: 657 | SEQ ID NO: 2099 |
| KHK_miR_1658 | SEQ ID NO: 658 | SEQ ID NO: 2100 |
| | | SEQ ID NO: 2101 |
| KHK_miR_1659 | SEQ ID NO: 659 | SEQ ID NO: 2102 |
| KHK_miR_1660 | SEQ ID NO: 660 | SEQ ID NO: 2103 |
| KHK_miR_1661 | SEQ ID NO: 661 | SEQ ID NO: 2104 |
| KHK_miR_1662 | SEQ ID NO: 662 | SEQ ID NO: 2105 |
| KHK_miR_1663 | SEQ ID NO: 663 | SEQ ID NO: 2106 |
| KHK_miR_1664 | SEQ ID NO: 664 | SEQ ID NO: 2107 |
| KHK_miR_1665 | SEQ ID NO: 665 | SEQ ID NO: 2108 |
| KHK_miR_1666 | SEQ ID NO: 666 | SEQ ID NO: 2109 |
| KHK_miR_1667 | SEQ ID NO: 667 | SEQ ID NO: 2110 |
| KHK_miR_1668 | SEQ ID NO: 668 | SEQ ID NO: 2111 |
| KHK_miR_1669 | SEQ ID NO: 669 | SEQ ID NO: 2112 |
| KHK_miR_1670 | SEQ ID NO: 670 | SEQ ID NO: 2113 |
| KHK_miR_1671 | SEQ ID NO: 671 | SEQ ID NO: 2114 |
| KHK_miR_1672 | SEQ ID NO: 672 | SEQ ID NO: 2115 |
| KHK_miR_1673 | SEQ ID NO: 673 | SEQ ID NO: 2116 |

TABLE 1-21

| nucleic acid | | micro-RNA |
|---|---|---|
| name | micro-RNA | precursor |
| KHK_miR_1674 | SEQ ID NO: 674 | SEQ ID NO: 2117 |
| KHK_miR_1675 | SEQ ID NO: 675 | SEQ ID NO: 2118 |
| KHK_miR_1676 | SEQ ID NO: 676 | SEQ ID NO: 2119 |
| KHK_miR_1677 | SEQ ID NO: 677 | SEQ ID NO: 2120 |
| KHK_miR_1678 | SEQ ID NO: 678 | SEQ ID NO: 2121 |
| | | SEQ ID NO: 2122 |
| KHK_miR_1679 | SEQ ID NO: 679 | SEQ ID NO: 2123 |
| KHK_miR_1680 | SEQ ID NO: 680 | SEQ ID NO: 2124 |
| | | SEQ ID NO: 2125 |
| | | SEQ ID NO: 2126 |
| | | SEQ ID NO: 2127 |
| KHK_miR_1681 | SEQ ID NO: 681 | SEQ ID NO: 2128 |
| KHK_miR_1682 | SEQ ID NO: 682 | SEQ ID NO: 2129 |
| KHK_miR_1683 | SEQ ID NO: 683 | SEQ ID NO: 2130 |
| KHK_miR_1684 | SEQ ID NO: 684 | SEQ ID NO: 2131 |
| KHK_miR_1685 | SEQ ID NO: 685 | SEQ ID NO: 2132 |
| KHK_miR_1686 | SEQ ID NO: 686 | SEQ ID NO: 2133 |
| KHK_miR_1687 | SEQ ID NO: 687 | SEQ ID NO: 2134 |
| KHK_miR_1688 | SEQ ID NO: 688 | SEQ ID NO: 2135 |
| KHK_miR_1689 | SEQ ID NO: 689 | SEQ ID NO: 2136 |
| KHK_miR_1690 | SEQ ID NO: 690 | SEQ ID NO: 2137 |
| KHK_miR_1691 | SEQ ID NO: 691 | SEQ ID NO: 2138 |
| | | SEQ ID NO: 2139 |
| KHK_miR_1692 | SEQ ID NO: 692 | SEQ ID NO: 2140 |
| KHK_miR_1693 | SEQ ID NO: 693 | SEQ ID NO: 2141 |
| KHK_miR_1694 | SEQ ID NO: 694 | SEQ ID NO: 2142 |
| KHK_miR_1695 | SEQ ID NO: 695 | SEQ ID NO: 2143 |
| KHK_miR_1696 | SEQ ID NO: 696 | SEQ ID NO: 2144 |
| KHK_miR_1697 | SEQ ID NO: 697 | SEQ ID NO: 2145 |
| KHK_miR_1698 | SEQ ID NO: 698 | SEQ ID NO: 2146 |
| KHK_miR_1699 | SEQ ID NO: 699 | SEQ ID NO: 2147 |
| KHK_miR_1700 | SEQ ID NO: 700 | SEQ ID NO: 2148 |
| KHK_miR_1701 | SEQ ID NO: 701 | SEQ ID NO: 2149 |
| KHK_miR_1702 | SEQ ID NO: 702 | SEQ ID NO: 2150 |
| KHK_miR_1703 | SEQ ID NO: 703 | SEQ ID NO: 2151 |
| KHK_miR_1704 | SEQ ID NO: 704 | SEQ ID NO: 2152 |
| KHK_miR_1705 | SEQ ID NO: 705 | SEQ ID NO: 2153 |
| KHK_miR_1706 | SEQ ID NO: 706 | SEQ ID NO: 2154 |
| KHK_miR_1707 | SEQ ID NO: 707 | SEQ ID NO: 2155 |

TABLE 1-22

| nucleic acid | | micro-RNA |
|---|---|---|
| name | micro-RNA | precursor |
| KHK_miR_1708 | SEQ ID NO: 708 | SEQ ID NO: 2156 |
| KHK_miR_1709 | SEQ ID NO: 709 | SEQ ID NO: 2157 |
| KHK_miR_1710 | SEQ ID NO: 710 | SEQ ID NO: 2158 |
| KHK_miR_1711 | SEQ ID NO: 711 | SEQ ID NO: 2159 |
| KHK_miR_1712 | SEQ ID NO: 712 | SEQ ID NO: 2160 |
| KHK_miR_1713 | SEQ ID NO: 713 | SEQ ID NO: 2161 |
| KHK_miR_1714 | SEQ ID NO: 714 | SEQ ID NO: 2162 |
| KHK_miR_1715 | SEQ ID NO: 715 | SEQ ID NO: 2163 |
| KHK_miR_1716 | SEQ ID NO: 716 | SEQ ID NO: 2164 |
| KHK_miR_1717 | SEQ ID NO: 717 | SEQ ID NO: 2165 |
| KHK_miR_1718 | SEQ ID NO: 718 | SEQ ID NO: 2166 |
| KHK_miR_1719 | SEQ ID NO: 719 | SEQ ID NO: 2167 |
| KHK_miR_1720 | SEQ ID NO: 720 | SEQ ID NO: 2168 |
| KHK_miR_1721 | SEQ ID NO: 721 | SEQ ID NO: 2169 |
| KHK_miR_1722 | SEQ ID NO: 722 | SEQ ID NO: 2170 |
| KHK_miR_1723 | SEQ ID NO: 723 | SEQ ID NO: 2171 |
| KHK_miR_1724 | SEQ ID NO: 724 | SEQ ID NO: 2172 |
| KHK_miR_1725 | SEQ ID NO: 725 | SEQ ID NO: 2173 |
| KHK_miR_1726 | SEQ ID NO: 726 | SEQ ID NO: 2174 |
| KHK_miR_1727 | SEQ ID NO: 727 | SEQ ID NO: 2175 |
| KHK_miR_1728 | SEQ ID NO: 728 | SEQ ID NO: 2176 |
| KHK_miR_1729 | SEQ ID NO: 729 | SEQ ID NO: 2177 |
| KHK_miR_1730 | SEQ ID NO: 730 | SEQ ID NO: 2178 |
| KHK_miR_1731 | SEQ ID NO: 731 | SEQ ID NO: 2179 |
| KHK_miR_1732 | SEQ ID NO: 732 | SEQ ID NO: 2180 |
| KHK_miR_1733 | SEQ ID NO: 733 | SEQ ID NO: 2181 |
| KHK_miR_1734 | SEQ ID NO: 734 | SEQ ID NO: 2182 |
| KHK_miR_1735 | SEQ ID NO: 735 | SEQ ID NO: 2183 |
| KHK_miR_1736 | SEQ ID NO: 736 | SEQ ID NO: 2184 |
| KHK_miR_1737 | SEQ ID NO: 737 | SEQ ID NO: 2185 |
| KHK_miR_1738 | SEQ ID NO: 738 | SEQ ID NO: 2186 |
| KHK_miR_1739 | SEQ ID NO: 739 | SEQ ID NO: 2187 |
| KHK_miR_1740 | SEQ ID NO: 740 | SEQ ID NO: 2188 |
| KHK_miR_1741 | SEQ ID NO: 741 | SEQ ID NO: 2189 |
| KHK_miR_1742 | SEQ ID NO: 742 | SEQ ID NO: 2190 |
| | | SEQ ID NO: 2191 |
| | | SEQ ID NO: 2192 |
| KHK_miR_1743 | SEQ ID NO: 743 | SEQ ID NO: 2193 |
| KHK_miR_1744 | SEQ ID NO: 744 | SEQ ID NO: 2194 |

TABLE 1-23

| nucleic acid | | micro-RNA |
|---|---|---|
| name | micro-RNA | precursor |
| KHK_miR_1745 | SEQ ID NO: 745 | SEQ ID NO: 2195 |
| KHK_miR_1746 | SEQ ID NO: 746 | SEQ ID NO: 2196 |
| | | SEQ ID NO: 2197 |
| KHK_miR_1747 | SEQ ID NO: 747 | SEQ ID NO: 2198 |
| KHK_miR_1748 | SEQ ID NO: 748 | SEQ ID NO: 2199 |
| KHK_miR_1749 | SEQ ID NO: 749 | SEQ ID NO: 2200 |
| KHK_miR_1750 | SEQ ID NO: 750 | SEQ ID NO: 2201 |
| KHK_miR_1751 | SEQ ID NO: 751 | SEQ ID NO: 2202 |
| KHK_miR_1752 | SEQ ID NO: 752 | SEQ ID NO: 2203 |
| KHK_miR_1753 | SEQ ID NO: 753 | SEQ ID NO: 2204 |
| KHK_miR_1754 | SEQ ID NO: 754 | SEQ ID NO: 2205 |
| KHK_miR_1755 | SEQ ID NO: 755 | SEQ ID NO: 2206 |
| KHK_miR_1756 | SEQ ID NO: 756 | SEQ ID NO: 2207 |
| KHK_miR_1757 | SEQ ID NO: 757 | SEQ ID NO: 2208 |
| KHK_miR_1758 | SEQ ID NO: 758 | SEQ ID NO: 2209 |
| KHK_miR_1759 | SEQ ID NO: 759 | SEQ ID NO: 2210 |
| KHK_miR_1760 | SEQ ID NO: 760 | SEQ ID NO: 2211 |
| KHK_miR_1761 | SEQ ID NO: 761 | SEQ ID NO: 2212 |
| KHK_miR_1762 | SEQ ID NO: 762 | SEQ ID NO: 2213 |
| KHK_miR_1763 | SEQ ID NO: 763 | SEQ ID NO: 2214 |
| KHK_miR_1764 | SEQ ID NO: 764 | SEQ ID NO: 2215 |
| KHK_miR_1765 | SEQ ID NO: 765 | SEQ ID NO: 2216 |
| KHK_miR_1766 | SEQ ID NO: 766 | SEQ ID NO: 2217 |
| KHK_miR_1767 | SEQ ID NO: 767 | SEQ ID NO: 2218 |
| KHK_miR_1768 | SEQ ID NO: 768 | SEQ ID NO: 2219 |
| | | SEQ ID NO: 2220 |
| | | SEQ ID NO: 2221 |
| | | SEQ ID NO: 2222 |
| KHK_miR_1769 | SEQ ID NO: 769 | SEQ ID NO: 2223 |
| KHK_miR_1770 | SEQ ID NO: 770 | SEQ ID NO: 2224 |
| KHK_miR_1771 | SEQ ID NO: 771 | SEQ ID NO: 2225 |
| KHK_miR_1772 | SEQ ID NO: 772 | SEQ ID NO: 2226 |
| KHK_miR_1773 | SEQ ID NO: 773 | SEQ ID NO: 2227 |
| KHK_miR_1774 | SEQ ID NO: 774 | SEQ ID NO: 2228 |
| KHK_miR_1775 | SEQ ID NO: 775 | SEQ ID NO: 2229 |
| | | SEQ ID NO: 2230 |
| | | SEQ ID NO: 2231 |
| KHK_miR_1776 | SEQ ID NO: 776 | SEQ ID NO: 2232 |
| KHK_miR_1777 | SEQ ID NO: 777 | SEQ ID NO: 2233 |

TABLE 1-24

| nucleic acid | | micro-RNA |
|---|---|---|
| name | micro-RNA | precursor |
| KHK_miR_1778 | SEQ ID NO: 778 | SEQ ID NO: 2234 |
| KHK_miR_1779 | SEQ ID NO: 779 | SEQ ID NO: 2235 |
| KHK_miR_1780 | SEQ ID NO: 780 | SEQ ID NO: 2236 |
| KHK_miR_1781 | SEQ ID NO: 781 | SEQ ID NO: 2237 |
| KHK_miR_1782 | SEQ ID NO: 782 | SEQ ID NO: 2238 |
| KHK_miR_1783 | SEQ ID NO: 783 | SEQ ID NO: 2239 |
| KHK_miR_1784 | SEQ ID NO: 784 | SEQ ID NO: 2240 |
| | | SEQ ID NO: 2241 |
| | | SEQ ID NO: 2242 |
| | | SEQ ID NO: 2243 |
| | | SEQ ID NO: 2244 |
| | | SEQ ID NO: 2245 |
| | | SEQ ID NO: 2246 |
| | | SEQ ID NO: 2247 |
| KHK_miR_1785 | SEQ ID NO: 785 | SEQ ID NO: 2248 |
| KHK_miR_1786 | SEQ ID NO: 786 | SEQ ID NO: 2249 |
| KHK_miR_1787 | SEQ ID NO: 787 | SEQ ID NO: 2250 |
| KHK_miR_1788 | SEQ ID NO: 788 | SEQ ID NO: 2251 |
| KHK_miR_1789 | SEQ ID NO: 789 | SEQ ID NO: 2252 |
| KHK_miR_1790 | SEQ ID NO: 790 | SEQ ID NO: 2253 |
| KHK_miR_1791 | SEQ ID NO: 791 | SEQ ID NO: 2254 |
| KHK_miR_1792 | SEQ ID NO: 792 | SEQ ID NO: 2255 |
| KHK_miR_1793 | SEQ ID NO: 793 | SEQ ID NO: 2256 |
| KHK_miR_1794 | SEQ ID NO: 794 | SEQ ID NO: 2257 |
| KHK_miR_1795 | SEQ ID NO: 795 | SEQ ID NO: 2258 |
| KHK_miR_1796 | SEQ ID NO: 796 | SEQ ID NO: 2259 |
| KHK_miR_1797 | SEQ ID NO: 797 | SEQ ID NO: 2260 |
| KHK_miR_1798 | SEQ ID NO: 798 | SEQ ID NO: 2261 |
| KHK_miR_1799 | SEQ ID NO: 799 | SEQ ID NO: 2262 |
| KHK_miR_1800 | SEQ ID NO: 800 | SEQ ID NO: 2263 |
| KHK_miR_1801 | SEQ ID NO: 801 | SEQ ID NO: 2264 |
| KHK_miR_1802 | SEQ ID NO: 802 | SEQ ID NO: 2265 |
| | | SEQ ID NO: 2266 |
| KHK_miR_1803 | SEQ ID NO: 803 | SEQ ID NO: 2267 |
| KHK_miR_1804 | SEQ ID NO: 804 | SEQ ID NO: 2268 |
| KHK_miR_1805 | SEQ ID NO: 805 | SEQ ID NO: 2269 |
| KHK_miR_1806 | SEQ ID NO: 806 | SEQ ID NO: 2270 |
| KHK_miR_1807 | SEQ ID NO: 807 | SEQ ID NO: 2271 |
| KHK_miR_1808 | SEQ ID NO: 808 | SEQ ID NO: 2272 |

TABLE 1-25

| nucleic acid | | micro-RNA |
|---|---|---|
| name | micro-RNA | precursor |
| KHK_miR_1809 | SEQ ID NO: 809 | SEQ ID NO: 2273 |
| KHK_miR_1810 | SEQ ID NO: 810 | SEQ ID NO: 2274 |
| KHK_miR_1811 | SEQ ID NO: 811 | SEQ ID NO: 2275 |
| KHK_miR_1812 | SEQ ID NO: 812 | SEQ ID NO: 2276 |
| KHK_miR_1813 | SEQ ID NO: 813 | SEQ ID NO: 2277 |
| KHK_miR_1814 | SEQ ID NO: 814 | SEQ ID NO: 2278 |
| KHK_miR_1815 | SEQ ID NO: 815 | SEQ ID NO: 2279 |
| KHK_miR_1816 | SEQ ID NO: 816 | SEQ ID NO: 2280 |
| KHK_miR_1817 | SEQ ID NO: 817 | SEQ ID NO: 2281 |
| KHK_miR_1818 | SEQ ID NO: 818 | SEQ ID NO: 2282 |
| KHK_miR_1819 | SEQ ID NO: 819 | SEQ ID NO: 2283 |
| KHK_miR_1820 | SEQ ID NO: 820 | SEQ ID NO: 2284 |
| | | SEQ ID NO: 2285 |
| | | SEQ ID NO: 2286 |
| | | SEQ ID NO: 2287 |
| KHK_miR_1821 | SEQ ID NO: 821 | SEQ ID NO: 2288 |
| KHK_miR_1822 | SEQ ID NO: 822 | SEQ ID NO: 2289 |
| KHK_miR_1823 | SEQ ID NO: 823 | SEQ ID NO: 2290 |
| | | SEQ ID NO: 2291 |
| | | SEQ ID NO: 2292 |
| | | SEQ ID NO: 2293 |
| | | SEQ ID NO: 2294 |
| KHK_miR_1824 | SEQ ID NO: 824 | SEQ ID NO: 2295 |
| KHK_miR_1825 | SEQ ID NO: 825 | SEQ ID NO: 2296 |
| KHK_miR_1826 | SEQ ID NO: 826 | SEQ ID NO: 2297 |
| KHK_miR_1827 | SEQ ID NO: 827 | SEQ ID NO: 2298 |
| KHK_miR_1828 | SEQ ID NO: 828 | SEQ ID NO: 2299 |
| KHK_miR_1829 | SEQ ID NO: 829 | SEQ ID NO: 2300 |
| KHK_miR_1830 | SEQ ID NO: 830 | SEQ ID NO: 2301 |
| | | SEQ ID NO: 2302 |
| KHK_miR_1831 | SEQ ID NO: 831 | SEQ ID NO: 2303 |
| KHK_miR_1832 | SEQ ID NO: 832 | SEQ ID NO: 2304 |
| KHK_miR_1833 | SEQ ID NO: 833 | SEQ ID NO: 2305 |
| KHK_miR_1834 | SEQ ID NO: 834 | SEQ ID NO: 2306 |
| KHK_miR_1835 | SEQ ID NO: 835 | SEQ ID NO: 2307 |
| KHK_miR_1836 | SEQ ID NO: 836 | SEQ ID NO: 2308 |
| KHK_miR_1837 | SEQ ID NO: 837 | SEQ ID NO: 2309 |
| KHK_miR_1838 | SEQ ID NO: 838 | SEQ ID NO: 2310 |
| KHK_miR_1839 | SEQ ID NO: 839 | SEQ ID NO: 2311 |

TABLE 1-26

| nucleic acid | | micro-RNA |
|---|---|---|
| name | micro-RNA | precursor |
| KHK_miR_1840 | SEQ ID NO: 840 | SEQ ID NO: 2312 |
| KHK_miR_1841 | SEQ ID NO: 841 | SEQ ID NO: 2313 |
| KHK_miR_1842 | SEQ ID NO: 842 | SEQ ID NO: 2314 |
| KHK_miR_1843 | SEQ ID NO: 843 | SEQ ID NO: 2315 |
| KHK_miR_1844 | SEQ ID NO: 844 | SEQ ID NO: 2316 |
| KHK_miR_1845 | SEQ ID NO: 845 | SEQ ID NO: 2317 |
| KHK_miR_1846 | SEQ ID NO: 846 | SEQ ID NO: 2318 |
| KHK_miR_1847 | SEQ ID NO: 847 | SEQ ID NO: 2319 |
| KHK_miR_1848 | SEQ ID NO: 848 | SEQ ID NO: 2320 |
| KHK_miR_1849 | SEQ ID NO: 849 | SEQ ID NO: 2321 |
| KHK_miR_1850 | SEQ ID NO: 850 | SEQ ID NO: 2322 |
| KHK_miR_1851 | SEQ ID NO: 851 | SEQ ID NO: 2323 |
| KHK_miR_1852 | SEQ ID NO: 852 | SEQ ID NO: 2324 |
| | | SEQ ID NO: 2325 |
| KHK_miR_1853 | SEQ ID NO: 853 | SEQ ID NO: 2326 |
| KHK_miR_1854 | SEQ ID NO: 854 | SEQ ID NO: 2327 |
| KHK_miR_1855 | SEQ ID NO: 855 | SEQ ID NO: 2328 |
| KHK_miR_1856 | SEQ ID NO: 856 | SEQ ID NO: 2329 |
| KHK_miR_1857 | SEQ ID NO: 857 | SEQ ID NO: 2330 |
| KHK_miR_1858 | SEQ ID NO: 858 | SEQ ID NO: 2331 |
| KHK_miR_1859 | SEQ ID NO: 859 | SEQ ID NO: 2332 |
| KHK_miR_1860 | SEQ ID NO: 860 | SEQ ID NO: 2333 |
| KHK_miR_1861 | SEQ ID NO: 861 | SEQ ID NO: 2334 |
| KHK_miR_1862 | SEQ ID NO: 862 | SEQ ID NO: 2335 |
| KHK_miR_1863 | SEQ ID NO: 863 | SEQ ID NO: 2336 |
| KHK_miR_1864 | SEQ ID NO: 864 | SEQ ID NO: 2337 |
| KHK_miR_1865 | SEQ ID NO: 865 | SEQ ID NO: 2338 |
| KHK_miR_1866 | SEQ ID NO: 866 | SEQ ID NO: 2339 |
| KHK_miR_1867 | SEQ ID NO: 867 | SEQ ID NO: 2340 |
| KHK_miR_1868 | SEQ ID NO: 868 | SEQ ID NO: 2341 |
| KHK_miR_1869 | SEQ ID NO: 869 | SEQ ID NO: 2342 |
| KHK_miR_1870 | SEQ ID NO: 870 | SEQ ID NO: 2343 |
| | | SEQ ID NO: 2344 |
| KHK_miR_1871 | SEQ ID NO: 871 | SEQ ID NO: 2345 |
| KHK_miR_1872 | SEQ ID NO: 872 | SEQ ID NO: 2346 |
| KHK_miR_1873 | SEQ ID NO: 873 | SEQ ID NO: 2347 |
| KHK_miR_1874 | SEQ ID NO: 874 | SEQ ID NO: 2348 |
| KHK_miR_1875 | SEQ ID NO: 875 | SEQ ID NO: 2349 |
| KHK_miR_1876 | SEQ ID NO: 876 | SEQ ID NO: 2350 |

TABLE 1-27

| nucleic acid | | micro-RNA |
|---|---|---|
| name | micro-RNA | precursor |
| KHK_miR_1877 | SEQ ID NO: 877 | SEQ ID NO: 2351 |
| KHK_miR_1878 | SEQ ID NO: 878 | SEQ ID NO: 2352 |
| KHK_miR_1879 | SEQ ID NO: 879 | SEQ ID NO: 2353 |
| | | SEQ ID NO: 2354 |
| KHK_miR_1880 | SEQ ID NO: 880 | SEQ ID NO: 2355 |
| KHK_miR_1881 | SEQ ID NO: 881 | SEQ ID NO: 2356 |
| KHK_miR_1882 | SEQ ID NO: 882 | SEQ ID NO: 2357 |
| KHK_miR_1883 | SEQ ID NO: 883 | SEQ ID NO: 2358 |
| KHK_miR_1884 | SEQ ID NO: 884 | SEQ ID NO: 2359 |
| KHK_miR_1885 | SEQ ID NO: 885 | SEQ ID NO: 2360 |
| KHK_miR_1886 | SEQ ID NO: 886 | SEQ ID NO: 2361 |
| KHK_miR_1887 | SEQ ID NO: 887 | SEQ ID NO: 2362 |
| KHK_miR_1888 | SEQ ID NO: 888 | SEQ ID NO: 2363 |
| KHK_miR_1889 | SEQ ID NO: 889 | SEQ ID NO: 2364 |
| KHK_miR_1890 | SEQ ID NO: 890 | SEQ ID NO: 2365 |
| KHK_miR_1891 | SEQ ID NO: 891 | SEQ ID NO: 2366 |
| KHK_miR_1892 | SEQ ID NO: 892 | SEQ ID NO: 2367 |
| KHK_miR_1893 | SEQ ID NO: 893 | SEQ ID NO: 2368 |
| KHK_miR_1894 | SEQ ID NO: 894 | SEQ ID NO: 2369 |
| | | SEQ ID NO: 2370 |
| | | SEQ ID NO: 2371 |
| KHK_miR_1895 | SEQ ID NO: 895 | SEQ ID NO: 2372 |
| KHK_miR_1896 | SEQ ID NO: 896 | SEQ ID NO: 2373 |
| KHK_miR_1897 | SEQ ID NO: 897 | SEQ ID NO: 2374 |
| KHK_miR_1898 | SEQ ID NO: 898 | SEQ ID NO: 2375 |
| | | SEQ ID NO: 2376 |
| | | SEQ ID NO: 2377 |
| KHK_miR_1899 | SEQ ID NO: 899 | SEQ ID NO: 2378 |
| KHK_miR_1900 | SEQ ID NO: 900 | SEQ ID NO: 2379 |
| KHK_miR_1901 | SEQ ID NO: 901 | SEQ ID NO: 2380 |
| KHK_miR_1902 | SEQ ID NO: 902 | SEQ ID NO: 2381 |
| | | SEQ ID NO: 2382 |
| KHK_miR_1903 | SEQ ID NO: 903 | SEQ ID NO: 2383 |
| | | SEQ ID NO: 2384 |
| KHK_miR_1904 | SEQ ID NO: 904 | SEQ ID NO: 2385 |
| KHK_miR_1905 | SEQ ID NO: 905 | SEQ ID NO: 2386 |
| KHK_miR_1906 | SEQ ID NO: 906 | SEQ ID NO: 2387 |
| KHK_miR_1907 | SEQ ID NO: 907 | SEQ ID NO: 2388 |
| | | SEQ ID NO: 2389 |

TABLE 1-28

| nucleic acid | | micro-RNA |
|---|---|---|
| name | micro-RNA | precursor |
| KHK_miR_1908 | SEQ ID NO: 908 | SEQ ID NO: 2390 |
| KHK_miR_1909 | SEQ ID NO: 909 | SEQ ID NO: 2391 |
| KHK_miR_1910 | SEQ ID NO: 910 | SEQ ID NO: 2392 |
| KHK_miR_1911 | SEQ ID NO: 911 | SEQ ID NO: 2393 |
| KHK_miR_1912 | SEQ ID NO: 912 | SEQ ID NO: 2394 |
| KHK_miR_1913 | SEQ ID NO: 913 | SEQ ID NO: 2395 |
| KHK_miR_1914 | SEQ ID NO: 914 | SEQ ID NO: 2396 |
| KHK_miR_1915 | SEQ ID NO: 915 | SEQ ID NO: 2397 |
| KHK_miR_1916 | SEQ ID NO: 916 | SEQ ID NO: 2398 |
| KHK_miR_1917 | SEQ ID NO: 917 | SEQ ID NO: 2399 |
| KHK_miR_1918 | SEQ ID NO: 918 | SEQ ID NO: 2400 |
| KHK_miR_1919 | SEQ ID NO: 919 | SEQ ID NO: 2401 |
| KHK_miR_1920 | SEQ ID NO: 920 | SEQ ID NO: 2402 |
| | | SEQ ID NO: 2403 |
| | | SEQ ID NO: 2404 |
| | | SEQ ID NO: 2405 |
| | | SEQ ID NO: 2406 |
| | | SEQ ID NO: 2407 |
| KHK_miR_1921 | SEQ ID NO: 921 | SEQ ID NO: 2408 |
| | | SEQ ID NO: 2409 |
| | | SEQ ID NO: 2410 |
| KHK_miR_1922 | SEQ ID NO: 922 | SEQ ID NO: 2411 |
| KHK_miR_1923 | SEQ ID NO: 923 | SEQ ID NO: 2412 |
| | | SEQ ID NO: 2413 |
| KHK_miR_1924 | SEQ ID NO: 924 | SEQ ID NO: 2414 |
| KHK_miR_1925 | SEQ ID NO: 925 | SEQ ID NO: 2415 |
| | | SEQ ID NO: 2416 |
| | | SEQ ID NO: 2417 |
| KHK_miR_1926 | SEQ ID NO: 926 | SEQ ID NO: 2418 |
| KHK_miR_1927 | SEQ ID NO: 927 | SEQ ID NO: 2419 |
| KHK_miR_1928 | SEQ ID NO: 928 | SEQ ID NO: 2420 |
| KHK_miR_1929 | SEQ ID NO: 929 | SEQ ID NO: 2421 |
| | | SEQ ID NO: 2422 |
| KHK_miR_1930 | SEQ ID NO: 930 | SEQ ID NO: 2423 |
| KHK_miR_1931 | SEQ ID NO: 931 | SEQ ID NO: 2424 |
| | | SEQ ID NO: 2425 |
| | | SEQ ID NO: 2426 |
| | | SEQ ID NO: 2427 |
| KHK_miR_1932 | SEQ ID NO: 932 | SEQ ID NO: 2428 |

TABLE 1-29

| nucleic acid | | micro-RNA |
|---|---|---|
| name | micro-RNA | precursor |
| | | SEQ ID NO: 2429 |
| | | SEQ ID NO: 2430 |
| KHK_miR_1933 | SEQ ID NO: 933 | SEQ ID NO: 2431 |
| KHK_miR_1934 | SEQ ID NO: 934 | SEQ ID NO: 2432 |
| KHK_miR_1935 | SEQ ID NO: 935 | SEQ ID NO: 2433 |
| | | SEQ ID NO: 2434 |
| KHK_miR_1936 | SEQ ID NO: 936 | SEQ ID NO: 2435 |
| KHK_miR_1937 | SEQ ID NO: 937 | SEQ ID NO: 2436 |
| | | SEQ ID NO: 2437 |
| KHK_miR_1938 | SEQ ID NO: 938 | SEQ ID NO: 2438 |
| KHK_miR_1939 | SEQ ID NO: 939 | SEQ ID NO: 2439 |
| KHK_miR_1940 | SEQ ID NO: 940 | SEQ ID NO: 2440 |
| KHK_miR_1941 | SEQ ID NO: 941 | SEQ ID NO: 2441 |
| | | SEQ ID NO: 2442 |
| | | SEQ ID NO: 2443 |
| KHK_miR_1942 | SEQ ID NO: 942 | SEQ ID NO: 2444 |
| | | SEQ ID NO: 2445 |
| KHK_miR_1943 | SEQ ID NO: 943 | SEQ ID NO: 2446 |
| KHK_miR_1944 | SEQ ID NO: 944 | SEQ ID NO: 2447 |
| KHK_miR_1945 | SEQ ID NO: 945 | SEQ ID NO: 2448 |
| KHK_miR_1946 | SEQ ID NO: 946 | SEQ ID NO: 2449 |
| KHK_miR_1947 | SEQ ID NO: 947 | SEQ ID NO: 2450 |
| KHK_miR_1948 | SEQ ID NO: 948 | SEQ ID NO: 2451 |
| | | SEQ ID NO: 2452 |
| KHK_miR_1949 | SEQ ID NO: 949 | SEQ ID NO: 2453 |
| | | SEQ ID NO: 2454 |
| KHK_miR_1950 | SEQ ID NO: 950 | SEQ ID NO: 2455 |
| KHK_miR_1951 | SEQ ID NO: 951 | SEQ ID NO: 2456 |
| KHK_miR_1952 | SEQ ID NO: 952 | SEQ ID NO: 2457 |
| KHK_miR_1953 | SEQ ID NO: 953 | SEQ ID NO: 2458 |
| | | SEQ ID NO: 2459 |
| | | SEQ ID NO: 2460 |
| KHK_miR_1954 | SEQ ID NO: 954 | SEQ ID NO: 2461 |
| | | SEQ ID NO: 2462 |
| KHK_miR_1955 | SEQ ID NO: 955 | SEQ ID NO: 2463 |
| KHK_miR_1956 | SEQ ID NO: 956 | SEQ ID NO: 2464 |
| KHK_miR_1957 | SEQ ID NO: 957 | SEQ ID NO: 2465 |
| KHK_miR_1958 | SEQ ID NO: 958 | SEQ ID NO: 2466 |
| KHK_miR_1959 | SEQ ID NO: 959 | SEQ ID NO: 2467 |

TABLE 1-30

| nucleic acid | | micro-RNA |
|---|---|---|
| name | micro-RNA | precursor |
| KHK_miR_1960 | SEQ ID NO: 960 | SEQ ID NO: 2468 |
| KHK_miR_1961 | SEQ ID NO: 961 | SEQ ID NO: 2469 |
| KHK_miR_1962 | SEQ ID NO: 962 | SEQ ID NO: 2470 |
| KHK_miR_1963 | SEQ ID NO: 963 | SEQ ID NO: 2471 |
| | | SEQ ID NO: 2472 |
| | | SEQ ID NO: 2473 |
| KHK_miR_1964 | SEQ ID NO: 964 | SEQ ID NO: 2474 |
| KHK_miR_1965 | SEQ ID NO: 965 | SEQ ID NO: 2475 |
| KHK_miR_1966 | SEQ ID NO: 966 | SEQ ID NO: 2476 |
| KHK_miR_1967 | SEQ ID NO: 967 | SEQ ID NO: 2477 |
| | | SEQ ID NO: 2478 |
| KHK_miR_1968 | SEQ ID NO: 968 | SEQ ID NO: 2479 |
| KHK_miR_1969 | SEQ ID NO: 969 | SEQ ID NO: 2480 |
| KHK_miR_1970 | SEQ ID NO: 970 | SEQ ID NO: 2481 |
| KHK_miR_1971 | SEQ ID NO: 971 | SEQ ID NO: 2482 |
| KHK_miR_1972 | SEQ ID NO: 972 | SEQ ID NO: 2483 |
| KHK_miR_1973 | SEQ ID NO: 973 | SEQ ID NO: 2484 |
| KHK_miR_1974 | SEQ ID NO: 974 | SEQ ID NO: 2485 |
| KHK_miR_1975 | SEQ ID NO: 975 | SEQ ID NO: 2486 |
| KHK_miR_1976 | SEQ ID NO: 976 | SEQ ID NO: 2487 |
| KHK_miR_1977 | SEQ ID NO: 977 | SEQ ID NO: 2488 |
| KHK_miR_1978 | SEQ ID NO: 978 | SEQ ID NO: 2489 |
| KHK_miR_1979 | SEQ ID NO: 979 | SEQ ID NO: 2490 |
| KHK_miR_1980 | SEQ ID NO: 980 | SEQ ID NO: 2491 |
| KHK_miR_1981 | SEQ ID NO: 981 | SEQ ID NO: 2492 |
| KHK_miR_1982 | SEQ ID NO: 982 | SEQ ID NO: 2493 |
| KHK_miR_1983 | SEQ ID NO: 983 | SEQ ID NO: 2494 |
| KHK_miR_1984 | SEQ ID NO: 984 | SEQ ID NO: 2495 |
| KHK_miR_1985 | SEQ ID NO: 985 | SEQ ID NO: 2496 |
| KHK_miR_1986 | SEQ ID NO: 986 | SEQ ID NO: 2497 |
| KHK_miR_1987 | SEQ ID NO: 987 | SEQ ID NO: 2498 |
| KHK_miR_1988 | SEQ ID NO: 988 | SEQ ID NO: 2499 |
| KHK_miR_1989 | SEQ ID NO: 989 | SEQ ID NO: 2500 |
| KHK_miR_1990 | SEQ ID NO: 990 | SEQ ID NO: 2501 |
| KHK_miR_1991 | SEQ ID NO: 991 | SEQ ID NO: 2502 |
| KHK_miR_1992 | SEQ ID NO: 992 | SEQ ID NO: 2503 |
| KHK_miR_1993 | SEQ ID NO: 993 | SEQ ID NO: 2504 |
| KHK_miR_1994 | SEQ ID NO: 994 | SEQ ID NO: 2505 |
| KHK_miR_1995 | SEQ ID NO: 995 | SEQ ID NO: 2506 |

TABLE 1-31

| nucleic acid | | micro-RNA |
|---|---|---|
| name | micro-RNA | precursor |
| KHK_miR_1996 | SEQ ID NO: 996 | SEQ ID NO: 2507 |
| KHK_miR_1997 | SEQ ID NO: 997 | SEQ ID NO: 2508 |
| KHK_miR_1998 | SEQ ID NO: 998 | SEQ ID NO: 2509 |
| KHK_miR_1999 | SEQ ID NO: 999 | SEQ ID NO: 2510 |
| KHK_miR_2000 | SEQ ID NO: 1000 | SEQ ID NO: 2511 |
| KHK_miR_2001 | SEQ ID NO: 1001 | SEQ ID NO: 2512 |
| | | SEQ ID NO: 2513 |
| KHK_miR_2002 | SEQ ID NO: 1002 | SEQ ID NO: 2514 |
| KHK_miR_2003 | SEQ ID NO: 1003 | SEQ ID NO: 2515 |
| KHK_miR_2004 | SEQ ID NO: 1004 | SEQ ID NO: 2516 |
| KHK_miR_2005 | SEQ ID NO: 1005 | SEQ ID NO: 2517 |
| KHK_miR_2006 | SEQ ID NO: 1006 | SEQ ID NO: 2518 |
| KHK_miR_2007 | SEQ ID NO: 1007 | SEQ ID NO: 2519 |
| KHK_miR_2008 | SEQ ID NO: 1008 | SEQ ID NO: 2520 |
| KHK_miR_2009 | SEQ ID NO: 1009 | SEQ ID NO: 2521 |
| KHK_miR_2010 | SEQ ID NO: 1010 | SEQ ID NO: 2522 |
| KHK_miR_2011 | SEQ ID NO: 1011 | SEQ ID NO: 2523 |
| KHK_miR_2012 | SEQ ID NO: 1012 | SEQ ID NO: 2524 |
| KHK_miR_2013 | SEQ ID NO: 1013 | SEQ ID NO: 2525 |
| KHK_miR_2014 | SEQ ID NO: 1014 | SEQ ID NO: 2526 |
| KHK_miR_2015 | SEQ ID NO: 1015 | SEQ ID NO: 2527 |
| KHK_miR_2016 | SEQ ID NO: 1016 | SEQ ID NO: 2528 |
| KHK_miR_2017 | SEQ ID NO: 1017 | SEQ ID NO: 2529 |
| | | SEQ ID NO: 2530 |
| | | SEQ ID NO: 2531 |
| KHK_miR_2018 | SEQ ID NO: 1018 | SEQ ID NO: 2532 |
| KHK_miR_2019 | SEQ ID NO: 1019 | SEQ ID NO: 2533 |
| KHK_miR_2020 | SEQ ID NO: 1020 | SEQ ID NO: 2534 |
| KHK_miR_2021 | SEQ ID NO: 1021 | SEQ ID NO: 2535 |
| KHK_miR_2022 | SEQ ID NO: 1022 | SEQ ID NO: 2536 |
| KHK_miR_2023 | SEQ ID NO: 1023 | SEQ ID NO: 2537 |
| KHK_miR_2024 | SEQ ID NO: 1024 | SEQ ID NO: 2538 |
| KHK_miR_2025 | SEQ ID NO: 1025 | SEQ ID NO: 2539 |
| | | SEQ ID NO: 2540 |
| | | SEQ ID NO: 2541 |
| | | SEQ ID NO: 2542 |
| KHK_miR_2026 | SEQ ID NO: 1026 | SEQ ID NO: 2543 |
| KHK_miR_2027 | SEQ ID NO: 1027 | SEQ ID NO: 2544 |
| KHK_miR_2028 | SEQ ID NO: 1028 | SEQ ID NO: 2545 |

TABLE 1-32

| nucleic acid | | micro-RNA |
|---|---|---|
| name | micro-RNA | precursor |
| KHK_miR_2029 | SEQ ID NO: 1029 | SEQ ID NO: 2546 |
| KHK_miR_2030 | SEQ ID NO: 1030 | SEQ ID NO: 2547 |
| KHK_miR_2031 | SEQ ID NO: 1031 | SEQ ID NO: 2548 |
| KHK_miR_2032 | SEQ ID NO: 1032 | SEQ ID NO: 2549 |
| KHK_miR_2033 | SEQ ID NO: 1033 | SEQ ID NO: 2550 |
| KHK_miR_2034 | SEQ ID NO: 1034 | SEQ ID NO: 2551 |
| KHK_miR_2035 | SEQ ID NO: 1035 | SEQ ID NO: 2552 |
| KHK_miR_2036 | SEQ ID NO: 1036 | SEQ ID NO: 2553 |
| KHK_miR_2037 | SEQ ID NO: 1037 | SEQ ID NO: 2554 |
| | | SEQ ID NO: 2555 |
| | | SEQ ID NO: 2556 |
| | | SEQ ID NO: 2557 |
| KHK_miR_2038 | SEQ ID NO: 1038 | SEQ ID NO: 2558 |
| KHK_miR_2039 | SEQ ID NO: 1039 | SEQ ID NO: 2559 |
| KHK_miR_2040 | SEQ ID NO: 1040 | SEQ ID NO: 2560 |
| KHK_miR_2041 | SEQ ID NO: 1041 | SEQ ID NO: 2561 |
| KHK_miR_2042 | SEQ ID NO: 1042 | SEQ ID NO: 2562 |
| KHK_miR_2043 | SEQ ID NO: 1043 | SEQ ID NO: 2563 |
| KHK_miR_2044 | SEQ ID NO: 1044 | SEQ ID NO: 2564 |
| KHK_miR_2045 | SEQ ID NO: 1045 | SEQ ID NO: 2565 |
| KHK_miR_2046 | SEQ ID NO: 1046 | SEQ ID NO: 2566 |
| KHK_miR_2047 | SEQ ID NO: 1047 | SEQ ID NO: 2567 |
| KHK_miR_2048 | SEQ ID NO: 1048 | SEQ ID NO: 2568 |
| KHK_miR_2049 | SEQ ID NO: 1049 | SEQ ID NO: 2569 |
| | | SEQ ID NO: 2570 |
| KHK_miR_2050 | SEQ ID NO: 1050 | SEQ ID NO: 2571 |
| KHK_miR_2051 | SEQ ID NO: 1051 | SEQ ID NO: 2572 |
| KHK_miR_2052 | SEQ ID NO: 1052 | SEQ ID NO: 2573 |
| KHK_miR_2053 | SEQ ID NO: 1053 | SEQ ID NO: 2574 |
| KHK_miR_2054 | SEQ ID NO: 1054 | SEQ ID NO: 2575 |
| KHK_miR_2055 | SEQ ID NO: 1055 | SEQ ID NO: 2576 |
| KHK_miR_2056 | SEQ ID NO: 1056 | SEQ ID NO: 2577 |
| KHK_miR_2057 | SEQ ID NO: 1057 | SEQ ID NO: 2578 |
| KHK_miR_2058 | SEQ ID NO: 1058 | SEQ ID NO: 2579 |
| KHK_miR_2059 | SEQ ID NO: 1059 | SEQ ID NO: 2580 |
| KHK_miR_2060 | SEQ ID NO: 1060 | SEQ ID NO: 2581 |
| KHK_miR_2061 | SEQ ID NO: 1061 | SEQ ID NO: 2582 |
| KHK_miR_2062 | SEQ ID NO: 1062 | SEQ ID NO: 2583 |
| KHK_miR_2063 | SEQ ID NO: 1063 | SEQ ID NO: 2584 |

TABLE 1-33

| nucleic acid | | micro-RNA |
|---|---|---|
| name | micro-RNA | precursor |
| KHK_miR_2064 | SEQ ID NO: 1064 | SEQ ID NO: 2585 |
| KHK_miR_2065 | SEQ ID NO: 1065 | SEQ ID NO: 2586 |
| KHK_miR_2066 | SEQ ID NO: 1066 | SEQ ID NO: 2587 |
| KHK_miR_2067 | SEQ ID NO: 1067 | SEQ ID NO: 2588 |
| KHK_miR_2068 | SEQ ID NO: 1068 | SEQ ID NO: 2589 |
| KHK_miR_2069 | SEQ ID NO: 1069 | SEQ ID NO: 2590 |
| KHK_miR_2070 | SEQ ID NO: 1070 | SEQ ID NO: 2591 |
| KHK_miR_2071 | SEQ ID NO: 1071 | SEQ ID NO: 2592 |
| KHK_miR_2072 | SEQ ID NO: 1072 | SEQ ID NO: 2593 |
| KHK_miR_2073 | SEQ ID NO: 1073 | SEQ ID NO: 2594 |
| | | SEQ ID NO: 2595 |
| KHK_miR_2074 | SEQ ID NO: 1074 | SEQ ID NO: 2596 |
| KHK_miR_2075 | SEQ ID NO: 1075 | SEQ ID NO: 2597 |
| KHK_miR_2076 | SEQ ID NO: 1076 | SEQ ID NO: 2598 |
| KHK_miR_2077 | SEQ ID NO: 1077 | SEQ ID NO: 2599 |
| KHK_miR_2078 | SEQ ID NO: 1078 | SEQ ID NO: 2600 |
| KHK_miR_2079 | SEQ ID NO: 1079 | SEQ ID NO: 2601 |
| KHK_miR_2080 | SEQ ID NO: 1080 | SEQ ID NO: 2602 |
| KHK_miR_2081 | SEQ ID NO: 1081 | SEQ ID NO: 2603 |
| KHK_miR_2082 | SEQ ID NO: 1082 | SEQ ID NO: 2604 |
| KHK_miR_2083 | SEQ ID NO: 1083 | SEQ ID NO: 2605 |
| | | SEQ ID NO: 2606 |
| KHK_miR_2084 | SEQ ID NO: 1084 | SEQ ID NO: 2607 |
| KHK_miR_2085 | SEQ ID NO: 1085 | SEQ ID NO: 2608 |
| KHK_miR_2086 | SEQ ID NO: 1086 | SEQ ID NO: 2609 |
| KHK_miR_2087 | SEQ ID NO: 1087 | SEQ ID NO: 2610 |
| KHK_miR_2088 | SEQ ID NO: 1088 | SEQ ID NO: 2611 |
| KHK_miR_2089 | SEQ ID NO: 1089 | SEQ ID NO: 2612 |
| KHK_miR_2090 | SEQ ID NO: 1090 | SEQ ID NO: 2613 |
| KHK_miR_2091 | SEQ ID NO: 1091 | SEQ ID NO: 2614 |
| KHK_miR_2092 | SEQ ID NO: 1092 | SEQ ID NO: 2615 |
| KHK_miR_2093 | SEQ ID NO: 1093 | SEQ ID NO: 2616 |
| KHK_miR_2094 | SEQ ID NO: 1094 | SEQ ID NO: 2617 |
| KHK_miR_2095 | SEQ ID NO: 1095 | SEQ ID NO: 2618 |
| KHK_miR_2096 | SEQ ID NO: 1096 | SEQ ID NO: 2619 |
| KHK_miR_2097 | SEQ ID NO: 1097 | SEQ ID NO: 2620 |
| | | SEQ ID NO: 2621 |
| KHK_miR_2098 | SEQ ID NO: 1098 | SEQ ID NO: 2622 |
| | | SEQ ID NO: 2623 |

TABLE 1-34

| nucleic acid | | micro-RNA |
|---|---|---|
| name | micro-RNA | precursor |
| | | SEQ ID NO: 2624 |
| KHK_miR_2099 | SEQ ID NO: 1099 | SEQ ID NO: 2625 |
| KHK_miR_2100 | SEQ ID NO: 1100 | SEQ ID NO: 2626 |
| | | SEQ ID NO: 2627 |
| | | SEQ ID NO: 2628 |
| | | SEQ ID NO: 2629 |
| | | SEQ ID NO: 2630 |
| KHK_miR_2101 | SEQ ID NO: 1101 | SEQ ID NO: 2631 |
| KHK_miR_2102 | SEQ ID NO: 1102 | SEQ ID NO: 2632 |
| KHK_miR_2103 | SEQ ID NO: 1103 | SEQ ID NO: 2633 |
| KHK_miR_2104 | SEQ ID NO: 1104 | SEQ ID NO: 2634 |
| KHK_miR_2105 | SEQ ID NO: 1105 | SEQ ID NO: 2635 |
| KHK_miR_2106 | SEQ ID NO: 1106 | SEQ ID NO: 2636 |
| KHK_miR_2107 | SEQ ID NO: 1107 | SEQ ID NO: 2637 |
| KHK_miR_2108 | SEQ ID NO: 1108 | SEQ ID NO: 2638 |
| KHK_miR_2109 | SEQ ID NO: 1109 | SEQ ID NO: 2639 |
| KHK_miR_2110 | SEQ ID NO: 1110 | SEQ ID NO: 2640 |
| KHK_miR_2111 | SEQ ID NO: 1111 | SEQ ID NO: 2641 |
| KHK_miR_2112 | SEQ ID NO: 1112 | SEQ ID NO: 2642 |
| KHK_miR_2113 | SEQ ID NO: 1113 | SEQ ID NO: 2643 |
| KHK_miR_2114 | SEQ ID NO: 1114 | SEQ ID NO: 2644 |
| KHK_miR_2115 | SEQ ID NO: 1115 | SEQ ID NO: 2645 |
| KHK_miR_2116 | SEQ ID NO: 1116 | SEQ ID NO: 2646 |
| KHK_miR_2117 | SEQ ID NO: 1117 | SEQ ID NO: 2647 |
| KHK_miR_2118 | SEQ ID NO: 1118 | SEQ ID NO: 2648 |
| KHK_miR_2119 | SEQ ID NO: 1119 | SEQ ID NO: 2649 |
| | | SEQ ID NO: 2650 |
| KHK_miR_2120 | SEQ ID NO: 1120 | SEQ ID NO: 2651 |
| KHK_miR_2121 | SEQ ID NO: 1121 | SEQ ID NO: 2652 |
| KHK_miR_2122 | SEQ ID NO: 1122 | SEQ ID NO: 2653 |
| KHK_miR_2123 | SEQ ID NO: 1123 | SEQ ID NO: 2654 |
| KHK_miR_2124 | SEQ ID NO: 1124 | SEQ ID NO: 2655 |
| KHK_miR_2125 | SEQ ID NO: 1125 | SEQ ID NO: 2656 |
| KHK_miR_2126 | SEQ ID NO: 1126 | SEQ ID NO: 2657 |
| KHK_miR_2127 | SEQ ID NO: 1127 | SEQ ID NO: 2658 |
| KHK_miR_2128 | SEQ ID NO: 1128 | SEQ ID NO: 2659 |
| KHK_miR_2129 | SEQ ID NO: 1129 | SEQ ID NO: 2660 |
| KHK_miR_2130 | SEQ ID NO: 1130 | SEQ ID NO: 2661 |
| KHK_miR_2131 | SEQ ID NO: 1131 | SEQ ID NO: 2662 |

TABLE 1-35

| nucleic acid | | micro-RNA |
|---|---|---|
| name | micro-RNA | precursor |
| KHK_miR_2132 | SEQ ID NO: 1132 | SEQ ID NO: 2663 |
| KHK_miR_2133 | SEQ ID NO: 1133 | SEQ ID NO: 2664 |
| KHK_miR_2134 | SEQ ID NO: 1134 | SEQ ID NO: 2665 |
| KHK_miR_2135 | SEQ ID NO: 1135 | SEQ ID NO: 2666 |
| KHK_miR_2136 | SEQ ID NO: 1136 | SEQ ID NO: 2667 |
| KHK_miR_2137 | SEQ ID NO: 1137 | SEQ ID NO: 2668 |
| KHK_miR_2138 | SEQ ID NO: 1138 | SEQ ID NO: 2669 |
| KHK_miR_2139 | SEQ ID NO: 1139 | SEQ ID NO: 2670 |
| KHK_miR_2140 | SEQ ID NO: 1140 | SEQ ID NO: 2671 |
| KHK_miR_2141 | SEQ ID NO: 1141 | SEQ ID NO: 2672 |
| KHK_miR_2142 | SEQ ID NO: 1142 | SEQ ID NO: 2673 |
| KHK_miR_2143 | SEQ ID NO: 1143 | SEQ ID NO: 2674 |
| KHK_miR_2144 | SEQ ID NO: 1144 | SEQ ID NO: 2675 |
| KHK_miR_2145 | SEQ ID NO: 1145 | SEQ ID NO: 2676 |
| KHK_miR_2146 | SEQ ID NO: 1146 | SEQ ID NO: 2677 |
| KHK_miR_2147 | SEQ ID NO: 1147 | SEQ ID NO: 2678 |
| KHK_miR_2148 | SEQ ID NO: 1148 | SEQ ID NO: 2679 |
| KHK_miR_2149 | SEQ ID NO: 1149 | SEQ ID NO: 2680 |
| KHK_miR_2150 | SEQ ID NO: 1150 | SEQ ID NO: 2681 |
| KHK_miR_2151 | SEQ ID NO: 1151 | SEQ ID NO: 2682 |
| KHK_miR_2152 | SEQ ID NO: 1152 | SEQ ID NO: 2683 |
| KHK_miR_2153 | SEQ ID NO: 1153 | SEQ ID NO: 2684 |
| KHK_miR_2154 | SEQ ID NO: 1154 | SEQ ID NO: 2685 |
| KHK_miR_2155 | SEQ ID NO: 1155 | SEQ ID NO: 2686 |
| KHK_miR_2156 | SEQ ID NO: 1156 | SEQ ID NO: 2687 |
| KHK_miR_2157 | SEQ ID NO: 1157 | SEQ ID NO: 2688 |
| KHK_miR_2158 | SEQ ID NO: 1159 | SEQ ID NO: 2689 |
| KHK_miR_2159 | SEQ ID NO: 1159 | SEQ ID NO: 2690 |
| KHK_miR_2160 | SEQ ID NO: 1160 | SEQ ID NO: 2691 |
| KHK_miR_2161 | SEQ ID NO: 1161 | SEQ ID NO: 2692 |
| KHK_miR_2162 | SEQ ID NO: 1162 | SEQ ID NO: 2693 |
| KHK_miR_2163 | SEQ ID NO: 1163 | SEQ ID NO: 2694 |
| KHK_miR_2164 | SEQ ID NO: 1164 | SEQ ID NO: 2695 |
| KHK_miR_2165 | SEQ ID NO: 1165 | SEQ ID NO: 2696 |
| KHK_miR_2166 | SEQ ID NO: 1166 | SEQ ID NO: 2697 |
| KHK_miR_2167 | SEQ ID NO: 1167 | SEQ ID NO: 2698 |
| KHK_miR_2168 | SEQ ID NO: 1168 | SEQ ID NO: 2699 |
| KHK_miR_2169 | SEQ ID NO: 1169 | SEQ ID NO: 2700 |
| | | SEQ ID NO: 2701 |

TABLE 1-36

| nucleic acid | | micro-RNA |
|---|---|---|
| name | micro-RNA | precursor |
| KHK_miR_2170 | SEQ ID NO: 1170 | SEQ ID NO: 2702 |
| KHK_miR_2171 | SEQ ID NO: 1171 | SEQ ID NO: 2703 |
| KHK_miR_2172 | SEQ ID NO: 1172 | SEQ ID NO: 2704 |
| KHK_miR_2173 | SEQ ID NO: 1173 | SEQ ID NO: 2705 |
| | | SEQ ID NO: 2706 |
| KHK_miR_2174 | SEQ ID NO: 1174 | SEQ ID NO: 2707 |
| KHK_miR_2175 | SEQ ID NO: 1175 | SEQ ID NO: 2708 |
| | | SEQ ID NO: 2709 |
| | | SEQ ID NO: 2710 |
| KHK_miR_2176 | SEQ ID NO: 1176 | SEQ ID NO: 2711 |
| KHK_miR_2177 | SEQ ID NO: 1177 | SEQ ID NO: 2712 |
| | | SEQ ID NO: 2713 |
| | | SEQ ID NO: 2714 |
| KHK_miR_2178 | SEQ ID NO: 1178 | SEQ ID NO: 2715 |
| KHK_miR_2179 | SEQ ID NO: 1179 | SEQ ID NO: 2716 |
| KHK_miR_2180 | SEQ ID NO: 1180 | SEQ ID NO: 2717 |
| KHK_miR_2181 | SEQ ID NO: 1181 | SEQ ID NO: 2718 |
| KHK_miR_2182 | SEQ ID NO: 1182 | SEQ ID NO: 2719 |
| KHK_miR_2183 | SEQ ID NO: 1183 | SEQ ID NO: 2720 |
| KHK_miR_2184 | SEQ ID NO: 1184 | SEQ ID NO: 2721 |
| KHK_miR_2185 | SEQ ID NO: 1185 | SEQ ID NO: 2722 |
| KHK_miR_2186 | SEQ ID NO: 1186 | SEQ ID NO: 2723 |
| KHK_miR_2187 | SEQ ID NO: 1187 | SEQ ID NO: 2724 |
| KHK_miR_2188 | SEQ ID NO: 1188 | SEQ ID NO: 2725 |
| KHK_miR_2189 | SEQ ID NO: 1189 | SEQ ID NO: 2726 |
| KHK_miR_2190 | SEQ ID NO: 1190 | SEQ ID NO: 2727 |
| KHK_miR_2191 | SEQ ID NO: 1191 | SEQ ID NO: 2728 |
| KHK_miR_2192 | SEQ ID NO: 1192 | SEQ ID NO: 2729 |
| KHK_miR_2193 | SEQ ID NO: 1193 | SEQ ID NO: 2730 |
| KHK_miR_2194 | SEQ ID NO: 1194 | SEQ ID NO: 2731 |
| KHK_miR_2195 | SEQ ID NO: 1195 | SEQ ID NO: 2732 |
| KHK_miR_2196 | SEQ ID NO: 1196 | SEQ ID NO: 2733 |
| KHK_miR_2197 | SEQ ID NO: 1197 | SEQ ID NO: 2734 |
| KHK_miR_2198 | SEQ ID NO: 1198 | SEQ ID NO: 2735 |
| KHK_miR_2199 | SEQ ID NO: 1199 | SEQ ID NO: 2736 |
| KHK_miR_2200 | SEQ ID NO: 1200 | SEQ ID NO: 2737 |
| KHK_miR_2201 | SEQ ID NO: 1201 | SEQ ID NO: 2738 |
| KHK_miR_2202 | SEQ ID NO: 1202 | SEQ ID NO: 2739 |
| KHK_miR_2203 | SEQ ID NO: 1203 | SEQ ID NO: 2740 |

TABLE 1-37

| nucleic acid | | micro-RNA |
|---|---|---|
| name | micro-RNA | precursor |
| | | SEQ ID NO: 2741 |
| | | SEQ ID NO: 2742 |
| KHK_miR_2204 | SEQ ID NO: 1204 | SEQ ID NO: 2743 |
| KHK_miR_2205 | SEQ ID NO: 1205 | SEQ ID NO: 2744 |
| KHK_miR_2206 | SEQ ID NO: 1206 | SEQ ID NO: 2745 |
| | | SEQ ID NO: 2746 |
| KHK_miR_2207 | SEQ ID NO: 1207 | SEQ ID NO: 2747 |
| KHK_miR_2208 | SEQ ID NO: 1208 | SEQ ID NO: 2748 |
| KHK_miR_2209 | SEQ ID NO: 1209 | SEQ ID NO: 2749 |
| KHK_miR_2210 | SEQ ID NO: 1210 | SEQ ID NO: 2750 |
| KHK_miR_2211 | SEQ ID NO: 1211 | SEQ ID NO: 2751 |
| KHK_miR_2212 | SEQ ID NO: 1212 | SEQ ID NO: 2752 |
| KHK_miR_2213 | SEQ ID NO: 1213 | SEQ ID NO: 2753 |
| KHK_miR_2214 | SEQ ID NO: 1214 | SEQ ID NO: 2754 |
| KHK_miR_2215 | SEQ ID NO: 1215 | SEQ ID NO: 2755 |
| KHK_miR_2216 | SEQ ID NO: 1216 | SEQ ID NO: 2756 |
| KHK_miR_2217 | SEQ ID NO: 1217 | SEQ ID NO: 2757 |
| KHK_miR_2218 | SEQ ID NO: 1218 | SEQ ID NO: 2758 |
| KHK_miR_2219 | SEQ ID NO: 1219 | SEQ ID NO: 2759 |
| | | SEQ ID NO: 2760 |
| KHK_miR_2220 | SEQ ID NO: 1220 | SEQ ID NO: 2761 |
| KHK_miR_2221 | SEQ ID NO: 1221 | SEQ ID NO: 2762 |
| KHK_miR_2222 | SEQ ID NO: 1222 | SEQ ID NO: 2763 |
| | | SEQ ID NO: 2764 |
| KHK_miR_2223 | SEQ ID NO: 1223 | SEQ ID NO: 2765 |
| KHK_miR_2224 | SEQ ID NO: 1224 | SEQ ID NO: 2766 |
| KHK_miR_2225 | SEQ ID NO: 1225 | SEQ ID NO: 2767 |
| KHK_miR_2226 | SEQ ID NO: 1226 | SEQ ID NO: 2768 |
| KHK_miR_2227 | SEQ ID NO: 1227 | SEQ ID NO: 2769 |
| KHK_miR_2228 | SEQ ID NO: 1228 | SEQ ID NO: 2770 |
| KHK_miR_2229 | SEQ ID NO: 1229 | SEQ ID NO: 2771 |
| KHK_miR_2230 | SEQ ID NO: 1230 | SEQ ID NO: 2772 |
| KHK_miR_2231 | SEQ ID NO: 1231 | SEQ ID NO: 2773 |
| KHK_miR_2232 | SEQ ID NO: 1232 | SEQ ID NO: 2774 |
| | | SEQ ID NO: 2775 |
| | | SEQ ID NO: 2776 |
| KHK_miR_2233 | SEQ ID NO: 1233 | SEQ ID NO: 2777 |
| KHK_miR_2234 | SEQ ID NO: 1234 | SEQ ID NO: 2778 |
| | | SEQ ID NO: 2779 |

TABLE 1-38

| nucleic acid | | micro-RNA |
|---|---|---|
| name | micro-RNA | precursor |
| | | SEQ ID NO: 2780 |
| | | SEQ ID NO: 2781 |
| | | SEQ ID NO: 2782 |
| KHK_miR_2235 | SEQ ID NO: 1235 | SEQ ID NO: 2783 |
| KHK_miR_2236 | SEQ ID NO: 1236 | SEQ ID NO: 2784 |
| KHK_miR_2237 | SEQ ID NO: 1237 | SEQ ID NO: 2785 |
| KHK_miR_2238 | SEQ ID NO: 1238 | SEQ ID NO: 2786 |
| | | SEQ ID NO: 2787 |
| | | SEQ ID NO: 2788 |
| KHK_miR_2239 | SEQ ID NO: 1239 | SEQ ID NO: 2789 |
| KHK_miR_2240 | SEQ ID NO: 1240 | SEQ ID NO: 2790 |
| KHK_miR_2241 | SEQ ID NO: 1241 | SEQ ID NO: 2791 |
| KHK_miR_2242 | SEQ ID NO: 1242 | SEQ ID NO: 2792 |
| KHK_miR_2243 | SEQ ID NO: 1243 | SEQ ID NO: 2793 |
| KHK_miR_2244 | SEQ ID NO: 1244 | SEQ ID NO: 2794 |
| KHK_miR_2245 | SEQ ID NO: 1245 | SEQ ID NO: 2795 |
| KHK_miR_2246 | SEQ ID NO: 1246 | SEQ ID NO: 2796 |
| KHK_miR_2247 | SEQ ID NO: 1247 | SEQ ID NO: 2797 |
| KHK_miR_2248 | SEQ ID NO: 1248 | SEQ ID NO: 2798 |
| KHK_miR_2249 | SEQ ID NO: 1249 | SEQ ID NO: 2799 |
| KHK_miR_2250 | SEQ ID NO: 1250 | SEQ ID NO: 2800 |
| KHK_miR_2251 | SEQ ID NO: 1251 | SEQ ID NO: 2801 |
| KHK_miR_2252 | SEQ ID NO: 1252 | SEQ ID NO: 2802 |
| | | SEQ ID NO: 2803 |
| | | SEQ ID NO: 2804 |
| | | SEQ ID NO: 2805 |
| KHK_miR_2253 | SEQ ID NO: 1253 | SEQ ID NO: 2806 |
| KHK_miR_2254 | SEQ ID NO: 1254 | SEQ ID NO: 2807 |
| KHK_miR_2255 | SEQ ID NO: 1255 | SEQ ID NO: 2808 |
| KHK_miR_2256 | SEQ ID NO: 1256 | SEQ ID NO: 2809 |
| KHK_miR_2257 | SEQ ID NO: 1257 | SEQ ID NO: 2810 |
| KHK_miR_2258 | SEQ ID NO: 1258 | SEQ ID NO: 2811 |
| KHK_miR_2259 | SEQ ID NO: 1259 | SEQ ID NO: 2812 |
| | | SEQ ID NO: 2813 |
| KHK_miR_2260 | SEQ ID NO: 1260 | SEQ ID NO: 2814 |
| KHK_miR_2261 | SEQ ID NO: 1261 | SEQ ID NO: 2815 |
| KHK_miR_2262 | SEQ ID NO: 1262 | SEQ ID NO: 2816 |
| | | SEQ ID NO: 2817 |
| | | SEQ ID NO: 2818 |

TABLE 1-39

| nucleic acid | | micro-RNA |
|---|---|---|
| name | micro-RNA | precursor |
| | | SEQ ID NO: 2819 |
| | | SEQ ID NO: 2820 |
| KHK_miR_2263 | SEQ ID NO: 1263 | SEQ ID NO: 2821 |
| KHK_miR_2264 | SEQ ID NO: 1264 | SEQ ID NO: 2822 |
| KHK_miR_2265 | SEQ ID NO: 1265 | SEQ ID NO: 2823 |
| KHK_miR_2267 | SEQ ID NO: 1266 | SEQ ID NO: 2824 |
| KHK_miR_2269 | SEQ ID NO: 1267 | SEQ ID NO: 2825 |
| KHK_miR_2271 | SEQ ID NO: 1268 | SEQ ID NO: 2826 |
| KHK_miR_2272 | SEQ ID NO: 1269 | SEQ ID NO: 2827 |
| KHK_miR_2273 | SEQ ID NO: 1270 | SEQ ID NO: 2828 |
| KHK_miR_2274 | SEQ ID NO: 1271 | SEQ ID NO: 2829 |
| KHK_miR_2278 | SEQ ID NO: 1272 | SEQ ID NO: 2830 |
| KHK_miR_2280 | SEQ ID NO: 1273 | SEQ ID NO: 2831 |
| KHK_miR_2281 | SEQ ID NO: 1274 | SEQ ID NO: 2832 |
| KHK_miR_2282 | SEQ ID NO: 1275 | SEQ ID NO: 2833 |
| KHK_miR_2283 | SEQ ID NO: 1276 | SEQ ID NO: 2834 |
| KHK_miR_2284 | SEQ ID NO: 1277 | SEQ ID NO: 2835 |
| KHK_miR_2285 | SEQ ID NO: 1278 | SEQ ID NO: 2836 |
| KHK_miR_2286 | SEQ ID NO: 1279 | SEQ ID NO: 2837 |
| KHK_miR_2287 | SEQ ID NO: 1280 | SEQ ID NO: 2838 |
| KHK_miR_2288 | SEQ ID NO: 1281 | SEQ ID NO: 2839 |
| KHK_miR_2289 | SEQ ID NO: 1282 | SEQ ID NO: 2840 |
| KHK_miR_2290 | SEQ ID NO: 1283 | SEQ ID NO: 2841 |
| KHK_miR_2291 | SEQ ID NO: 1284 | SEQ ID NO: 2842 |
| KHK_miR_2292 | SEQ ID NO: 1285 | SEQ ID NO: 2843 |
| KHK_miR_2293 | SEQ ID NO: 1286 | SEQ ID NO: 2844 |
| KHK_miR_2294 | SEQ ID NO: 1287 | SEQ ID NO: 2845 |
| KHK_miR_2295 | SEQ ID NO: 1288 | SEQ ID NO: 2846 |
| KHK_miR_2296 | SEQ ID NO: 1289 | SEQ ID NO: 2847 |
| KHK_miR_2297 | SEQ ID NO: 1290 | SEQ ID NO: 2848 |
| KHK_miR_2298 | SEQ ID NO: 1291 | SEQ ID NO: 2849 |
| KHK_miR_2299 | SEQ ID NO: 1292 | SEQ ID NO: 2850 |
| KHK_miR_2300 | SEQ ID NO: 1293 | SEQ ID NO: 2851 |
| KHK_miR_2301 | SEQ ID NO: 1294 | pre-hsa-let-7a-1 |
| KHK_miR_2302 | SEQ ID NO: 1295 | pre-hsa-let-7d |
| KHK_miR_2303 | SEQ ID NO: 1296 | pre-hsa-let-7f-2 |
| KHK_miR_2304 | SEQ ID NO: 1297 | pre-hsa-mir-101-1 |
| KHK_miR_2305 | SEQ ID NO: 1298 | pre-hsa-mir-106b |
| KHK_miR_2306 | SEQ ID NO: 1299 | pre-hsa-mir-125a |

TABLE 1-40

| nucleic acid | | micro-RNA |
|---|---|---|
| name | micro-RNA | precursor |
| KHK_miR_2307 | SEQ ID NO: 1300 | pre-hsa-mir-128a |
| KHK_miR_2308 | SEQ ID NO: 1301 | pre-hsa-mir-130b |
| KHK_miR_2309 | SEQ ID NO: 1302 | pre-hsa-mir-132 |
| KHK_miR_2310 | SEQ ID NO: 1303 | pre-hsa-mir-141 |
| KHK_miR_2311 | SEQ ID NO: 1304 | pre-hsa-mir-148a |
| KHK_miR_2312 | SEQ ID NO: 1305 | pre-hsa-mir-15a |
| KHK_miR_2313 | SEQ ID NO: 1306 | pre-hsa-mir-16-1 |
| KHK_miR_2314 | SEQ ID NO: 1307 | pre-hsa-mir-16-2 |
| KHK_miR_2315 | SEQ ID NO: 1308 | pre-hsa-mir-196b |
| KHK_miR_2316 | SEQ ID NO: 1309 | pre-hsa-mir-19b-1 |
| KHK_miR_2317 | SEQ ID NO: 1310 | pre-hsa-mir-210 |
| KHK_miR_2318 | SEQ ID NO: 1311 | pre-hsa-mir-22 |
| KHK_miR_2319 | SEQ ID NO: 1312 | pre-hsa-mir-221 |
| KHK_miR_2320 | SEQ ID NO: 1313 | pre-hsa-mir-223 |
| KHK_miR_2321 | SEQ ID NO: 1314 | pre-hsa-mir-24-2 |
| KHK_miR_2322 | SEQ ID NO: 1315 | pre-hsa-mir-25 |
| KHK_miR_2323 | SEQ ID NO: 1316 | pre-hsa-mir-26a-2 |
| KHK_miR_2324 | SEQ ID NO: 1317 | pre-hsa-mir-26b |
| KHK_miR_2325 | SEQ ID NO: 1318 | pre-hsa-mir-29a |
| KHK_miR_2326 | SEQ ID NO: 1319 | pre-hsa-mir-29b-1 |
| KHK_miR_2327 | SEQ ID NO: 1320 | pre-hsa-mir-30c-1 |
| KHK_miR_2328 | SEQ ID NO: 1321 | pre-hsa-mir-30d |
| KHK_miR_2329 | SEQ ID NO: 1322 | pre-hsa-mir-33 |
| KHK_miR_2330 | SEQ ID NO: 1323 | pre-hsa-mir-339 |
| KHK_miR_2331 | SEQ ID NO: 1324 | pre-hsa-mir-340 |
| KHK_miR_2332 | SEQ ID NO: 1325 | pre-hsa-mir-342 |
| KHK_miR_2333 | SEQ ID NO: 1326 | pre-hsa-mir-34a |
| KHK_miR_2334 | SEQ ID NO: 1327 | pre-hsa-mir-361 |
| KHK_miR_2336 | SEQ ID NO: 1328 | pre-hsa-mir-500 |
| KHK_miR_2337 | SEQ ID NO: 1329 | pre-hsa-mir-93 |
| KHK_miR_2338 | SEQ ID NO: 1330 | pre-hsa-mir-140 |
| KHK_miR_2339 | SEQ ID NO: 1331 | pre-hsa-mir-151 |
| KHK_miR_2340 | SEQ ID NO: 1332 | pre-hsa-mir-181b-1 |
| KHK_miR_2341 | SEQ ID NO: 1333 | pre-hsa-mir-29b-2 |
| KHK_miR_2342 | SEQ ID NO: 1334 | pre-hsa-mir-29c |
| KHK_miR_2343 | SEQ ID NO: 1335 | pre-hsa-mir-423 |
| KHK_miR_2344 | SEQ ID NO: 1336 | pre-hsa-mir-7-1 |

[0125] As nucleic acids of the present invention, a nucleic acid consisting of a nucleotide sequence complementary to a nucleic acid mentioned above, and a double-stranded nucleic acid consisting of a nucleic acid mentioned above and a nucleic acid consisting of a nucleotide sequence complementary to the nucleotide sequence of the nucleic acid can also be mentioned.

[0126] In the present invention, a nucleic acid consisting of a nucleotide sequence having an identity of 90% or more to the nucleotide sequence of any one of SEQ ID NOs:1 to 1336 means a nucleic acid having an identity of at least 90% or more, preferably 91% or more, more preferably 92% or more, still more preferably 93% or more, particularly preferably 94% or more, and most preferably 95% or more, to a nucleic acid consisting of the nucleotide sequence of any one of SEQ ID NOs:1 to 1336, as calculated using an analytical software program such as BLAST [J. Mol. Biol., 215, 403 (1990)] or FASTA [Methods in Enzymology, 183, 63 (1990)]. In the present invention, a nucleic acid consisting of a nucleotide sequence having an identity of 80% or more to the nucleotide sequence of any one of SEQ ID NOs:1337 to 2851 means a nucleic acid having an identity of at least 80% or more, preferably 85% or more, more preferably 90% or more, still more preferably 92% or more, particularly preferably 95% or more, and most preferably 96% or more, to a nucleic acid consisting of the nucleotide sequence of any one of SEQ ID NOs:1337 to 2851, as calculated using an analytical software program such as BLAST [J. Mol. Biol., 215, 403 (1990)] or FASTA [Methods in Enzymology, 183, 63 (1990)].

[0127] In the present invention, a nucleic acid that hybridizes under stringent conditions includes, for example, a nucleic acid that can be identified by adding a probe RNA labeled γ-³²P-ATP to a Hybridization buffer consisting of 7.5 mL of 20×SSC, 0.6 mL of 1 M Na₂HPO₄ (pH 7.2), 21 mL of 10% SDS, 0.6 mL of 50× Denhardt′s solution, and 0.3 mL of 10 mg/mL sonicated salmon sperm DNA, wherein the probe is a nucleic acid having the nucleotide sequence of any of SEQ ID NOs:1 to 2851 or a partial fragment thereof, carrying out a reaction at 50° C. overnight, thereafter washing the membrane with 5×SSC/5% SDS liquid at 50° C. for 10 minutes, and further washing the same with 1×SSC/1% SDS liquid at 50° C. for 10 minutes, thereafter taking out the membrane, and applying it to an X-ray film.

[0128] In the present invention, the nucleic acid may be any molecule, as far as it is a molecule resulting from polymerization of a nucleotide or a molecule functionally equivalent to the nucleotide; for example, an RNA, which is a ribonucleotide polymer, a DNA, which is a deoxyribonucleotide polymer, a mixed polymer of RNA and DNA, and a nucleotide polymer, including a nucleotide analogue, can be mentioned; furthermore, the nucleic acid may be a nucleotide polymer, including a nucleic acid derivative, and may be a single-stranded nucleic acid or a double-stranded nucleic acid. A micro-RNA or a derivative thereof and a micro-RNA precursor or a derivative thereof are also included in nucleic acids of the present invention.

[0129] In the present invention, the nucleotide analogue may be any molecule, as far as it is a molecule prepared by modifying a ribonucleotide, a deoxyribonucleotide, an RNA or a DNA in order to improve the nuclease resistance thereof, to stabilize the same, to increase the affinity thereof for a complementary chain nucleic acid, to increase the cell permeability thereof, or to visualize the same, compared with the RNA or DNA; the analogue may be a naturally occurring molecule or a non-natural molecule; for example, a nucleotide analogue modified at the sugar moiety thereof, a nucleotide analogue modified by phosphodiester binding and the like can be mentioned.

[0130] The nucleotide analogue modified at the sugar moiety thereof may be any one, as far as an optionally chosen chemical structural substance has been added to, or substituted for, a portion or all of the chemical structure of the sugar of the nucleotide; for example, a nucleotide analogue substituted by 2′-O-methylribose, a nucleotide analogue substituted by 2′-O-propylribose, a nucleotide analogue substituted by 2′-methoxyethoxyribose, a nucleotide analogue substituted by 2′-O-methoxyethylribose, a nucleotide analogue substituted by 2′-O-[2-(guanidium)ethyl]ribose, a nucleotide analogue substituted by 2′-O-fluororibose, a bridged nucleic acid (BNA) having two cyclic structures as a result of introduction of a bridging structure into the sugar moiety, more specifically a locked nucleic acid (LNA) wherein the oxygen atom at the 2′ position and the carbon atom at the 4′ position have been bridged via methylene, and an ethylene bridged nucleic acid (ENA) [Nucleic Acid Research, 32, e175 (2004)] can be mentioned, and a peptide nucleic acid (PNA) [Acc. Chem. Res., 32, 624 (1999)], an oxypeptide nucleic acid (OPNA) [J. Am. Chem. Soc., 123, 4653 (2001)], and a peptide ribonucleic acid (PRNA) [J. Am. Chem. Soc., 122, 6900 (2000)] and the like can also be mentioned.

[0131] The nucleotide analogue modified by phosphodiester binding may be any one, as far as an optionally chosen chemical substance has been added to, or substituted for, a portion or all of the chemical structure of the phosphodiester bond of the nucleotide; for example, a nucleotide analogue substituted by a phosphorothioate bond, a nucleotide analogue substituted by an N3′-P5′ phosphoamidate bond, and the like can be mentioned [SAIBO KOGAKU, 16, 1463-1473 (1997)] [RNAi Method and Antisense Method, Kodansha (2005)].

[0132] In the present invention, the nucleic acid derivative may be any molecule, as far as it is a molecule prepared by adding another chemical substance to the nucleic acid in order to improve the nuclease resistance thereof, to stabilize the same, to increase the affinity thereof for a complementary chain nucleic acid, to increase the cell permeability thereof, or to visualize the same, compared with the nucleic acid; for example, a 5′-polyamine addition derivative, a cholesterol addition derivative, a steroid addition derivative, a bile acid addition derivative, a vitamin addition derivative, a Cy5 addition derivative, a Cy3 addition derivative, a 6-FAM addition derivative, a biotin addition derivative and the like can be mentioned.

[0133] As examples of the other nucleic acid derivatives, specifically as derivatives modified at the sugar moiety, an oligonucleotide derivative substituted by 2′-O-propylribose, an oligonucleotide derivative substituted by 2′-methoxyethoxyribose, an oligonucleotide derivative substituted by 2′-O-methylribose, an oligonucleotide derivative substituted by 2′-O-methoxyethylribose, an oligonucleotide derivative substituted by 2′-O-[2-(guanidium)ethyl]ribose, an oligonucleotide derivative substituted by 2′-O-fluororibose and the like can be mentioned; as derivatives modified at the phosphate group, an oligonucleotide derivative wherein a phosphodiester bond in an oligonucleotide has been converted to a phosphorothioate bond, an oligonucleotide derivatives wherein a phosphodiester bond in an oligonucleotide has been converted to an N3′-P5′phosphoamidate bond and the like can be mentioned [SAIBO KOGAKU, 16, 1463-1473 (1997)] [RNAi Method and Antisense Method, Kodansha (2005)].

[0134] In the present invention, the micro-RNA derivative may be any polymer comprising a molecule, other than a ribonucleotide, that is functionally equivalent to the micro-RNA; for example, a DNA, which is a deoxyribonucleotide polymer, a mixed polymer of RNA and DNA, and a nucleotide polymer, including a nucleotide analogue, can be mentioned; furthermore, the micro-RNA derivative may be a nucleotide polymer, including a nucleic acid derivative, and may be a single-stranded nucleic acid or a double-stranded nucleic acid.

[0135] The micro-RNA precursor derivative may be any one, as far as it is a polymer comprising a molecule, other than a ribonucleotide, that is functionally equivalent to the micro-RNA precursor; for example, a DNA, which is a deoxyribonucleotide polymer, a mixed polymer of RNA and DNA, and a nucleotide polymer, including a nucleotide analogue, can be mentioned; furthermore, the micro-RNA precursor derivative may be a nucleotide polymer, including a nucleic acid derivative, and may be a single-stranded nucleic acid or a double-stranded nucleic acid.

[0136] The method of producing a nucleic acid of the present invention is not particularly limited; the same can be produced by a method using a known chemical synthesis, or an enzymatic transcription method and the like. As methods using a known chemical synthesis, the phosphoroamidite method, the phosphorothioate method, the phosphotriester method, the CEM method [Nucleic Acid Research, 35, 3287 (2007)] and the like can be mentioned; for example, the same can be synthesized using the ABI3900 high throughput nucleic acid synthesizer (manufactured by Applied Biosystems). As an enzymatic transcription method, transcription with a plasmid or DNA having a desired nucleotide sequence as the template using a typical phage RNA polymerase, for example, T7, T3, or SP6RNA polymerase, can be mentioned.

[0137] The method of detecting the expression of a nucleic acid such as a micro-RNA or a micro-RNA precursor using a nucleic acid of the present invention may be any method that enables detection of a nucleic acid in a sample; for example, (1) Northern hybridization, (2) dot blot hybridization, (3) in situ hybridization, (4) quantitative PCR, (5) differential hybridization, (6) microarray, (7) ribonuclease protection assay and the like can be mentioned.

[0138] The method of detecting a mutation of a nucleic acid such as a micro-RNA or a micro-RNA precursor using a nucleic acid of the present invention may be any method that enables detection of a mutation of the nucleotide sequence of a nucleic acid in a sample; for example, a method wherein a heteroduplex formed by hybridization of a nucleic acid having a non-mutated nucleotide sequence and a nucleic acid having a mutated nucleotide sequence are detected, or a method wherein a sample-derived nucleotide sequence is directly sequenced to detect the presence or absence of a mutation and the like can be mentioned.

[0139] The method of separating a cell that expresses a nucleic acid such as a micro-RNA or a micro-RNA precursor using a nucleic acid of the present invention may be any method that enables separation of a cell that expresses a nucleic acid such as a micro-RNA or a micro-RNA precursor from a mixture of various cells; for example, a method wherein a probe prepared by fluorescently labeling a nucleic acid having a sequence complementary to the nucleotide sequence of a nucleic acid of the present invention is introduced into a cell to cause hybridization with the probe, and only the cells that have hybridized with the labeled probe are separated using a flow cytometer with sorting function, and the like can be mentioned.

[0140] A vector that expresses a nucleic acid of the present invention refers to a vector designed for a nucleic acid of the present invention to be biosynthesized by being transcribed in a cell or in vitro, and the vector may be any vector having a promoter capable of transcribing a nucleic acid of the present invention in a cell or in vitro. Specifically, pcDNA6.2-GW/miR (manufactured by Invitrogen), pSilencer 4.1-CMV (manufactured by Ambion), pSINsi-hH1 DNA (manufactured by Takara Bio Inc.), pSINsi-hU6 DNA (manufactured by Takara Bio Inc.), pENTR/U6 (manufactured by Invitrogen) and the like can be mentioned.

[0141] The method of suppressing the expression of a gene having a target nucleotide sequence of a nucleic acid, such as a micro-RNA, of the present invention (hereinafter referred to as a target gene) may be any method that suppresses the expression of a target gene by means of the activity to suppress the expression of an mRNA having a target nucleotide sequence using a nucleic acid, such as a micro-RNA, of the present invention. Here, to suppress the expression encompasses a case where the translation of an mRNA is suppressed, and a case where cleavage or decomposition of an mRNA results in a decreased amount of protein translated from the mRNA.

[0142] A target nucleotide sequence refers to the nucleotide sequence of a nucleic acid consisting of several nucleotides recognized by a nucleic acid, such as a micro-RNA, of the present invention. The translation of an mRNA having the nucleotide sequence is suppressed by a nucleic acid, such as a micro-RNA, of the present invention. Because an mRNA having a nucleotide sequence complementary to the sequence of the 2nd to 8th nucleotides on the 5′ terminal side of a micro-RNA undergoes suppression of the translation thereof by the micro-RNA [Current Biology, 15, R458-R460 (2005)], a nucleotide sequence complementary to the sequence of the 2nd to 8th nucleotides on the 5′ terminal side of a nucleic acid, such as a micro-RNA, of the present invention, can be mentioned as a target nucleotide sequence of the nucleic acid, such as the micro-RNA. For example, by providing a target sequence complementary to the 2nd to 8th nucleotides on the 5′ terminal side of a micro-RNA, and selecting an mRNA comprising a sequence completely identical to a set of 3′ UTR nucleotide sequences of human mRNAs by a method such as character sequence search, the target nucleotide sequence can be determined. A set of 3′ UTR nucleotide sequences of human mRNAs can be prepared using information on genome sequences and gene positions that can be acquired from “UCSC Human Genome Browser Gateway (http://genome.ucsc.edu/cgi-bin/hgGateway)”. As specific examples of genes having a target nucleotide sequence of a micro-RNA of SEQ ID NOs:1 to 1336, the genes shown in Tables 2-1 to 2-35, represented by names (Official Symbols and Gene IDs) used in the EntreGene database (http://www.ncbi.nlm.nih.gov/Entrez/) of the US National Center for Biotechnology Information (NCBI), can be mentioned. The gene names used are names in the EntreGene database as of March 2006.

TABLE 2-1

| SEQ | |
|---|---|
| ID NO | Target gene |
| 1 | PRKCZ(5590); TNFRSF14(8764); TNFRSF9(3604); RCC2(55920); NBL1(4681); LDLRAD2(401944); CDC42(998); E2F2 |
| | (1870); RCC1(1104); SDC3(9672); KHDRBS1(10657); HPCA(3208); RIMS3(9783); TOE1(114034); SERBP1(26135); |
| | SYPL2(284612); SLC6A17(388662); MCL1(4170); TNRC4(11189); C1orf60(65123); IL6R(3570); ZBTB7B(51043); LMNA |
| | (4000); MEF2D(4209); PEA15(8682); DEDD(9191); QSCN6(5768); ADORA1(134); IL24(11009); TMEM63A(9725); RHOB |
| | (388); KCNK3(3777); ZFP36L2(678); HTRA2(27429); ADRA2B(151); BRRN1(23397); BCL2L11(10018); BBS5(129880); |
| | CASP10(843); ALS2CR19(117583); INHA(3623); HDAC4(9759); KIF1A(547); SEPT2(4735); NEU4(129807); ZAK |
| | (51776); OGG1(4968); HDAC11(79885); ZNF651(92999); ZNF445(353274); DAG1(1605); HEMK1(51409); RBM15B |
| | (29890); RNF7(9616); ALG3(10195); TP73L(8626); FLJ37478(339983); LRPAP1(4043); APBB2(323); PRLR(5618); ARSB |
| | (411); SEMA6A(57556); RAD50(10111); PFDN1(5201); WDR55(54853); N4BP3(23138); ATXN1(6310); E2F3(1871); |
| | IER3(8870); MCCD1(401250); C6orf47(57827); ZBTB12(221527); CREBL1(1388); PBX2(5089); BAK1(578); IHPK3(117283); |
| | CDKN1A(1026); ZFAND3(60685); KCNK5(8645); NFYA(4800); FOXO3A(2309); SNX8(29888); TRIAD3(54476); |
| | CARD4(10392); INHBA(3624); DKFZp761I2123(83637); ADCY1(107); YWHAG(7532); FLJ39237(375607); LRRC4(64101); |
| | EPHA1(2041); CDK5(1020); TNFRSF10B(8795); TNFRSF10C(8794); PTK2B(2185); KIF13B(23303); UNC5D(137970); |
| | EXT1(2131); DGAT1(8694); MGC70857(414919); GAS1(2619); SEMA4D(10507); TRAF1(7185); CDK9(1025); |
| | ST6GALNAC6(30815); ABL1(25); BRD3(8019); TRAF2(7186); C9orf140(89958); FLJ20245(54863); FRMD4A(55691); |
| | SPOCK2(9806); LOC439985(439985); PTEN(5728); SLIT1(6585); NOLC1(9221); C10orf46(143384); FAM53B(9679); |
| | FLJ46300(399827); MUCDHL(53841); TOLLIP(54472); BRSK2(9024); IGF2(3481); OSBPL5(114879); C11orf49(79096); |
| | VEGFB(7423); CDCA5(113130); DPF2(5977); SSSCA1(10534); RELA(5970); PPP1CA(5499); RPS6KB2(6199); |
| | CCND1(595); FADD(8772); INPPL1(3636); GAB2(9846); SCN4B(6330); ABCG4(64137); EI24(9538); ST3GAL4(6484); |
| | CACNA1C(775); TSPAN9(10867); CCND2(894); ING4(51147); PTMS(5763); FGD4(121512); FLJ20489(55652); HDAC7A |
| | (51564); RND1(27289); MCRS1(10445); FAIM2(23017); RARG(5916); GDF11(10220); CENTG1(116986); PPTC7 |
| | (160760); PPP1CC(5501); SCARB1(949); RAN(5901); DIP13B(55198); SLC7A1(6541); FLJ40296(122183); POU4F1(5457); |
| | LAMP1(3916); BCL2L2(599); TM9SF1(10548); FLJ39779(400223); ERH(2079); VASH1(22846); CHES1(1112); TRAF3 |
| | (7187); FLJ42486(388021); AKT1(207); NDN(4692); KLF13(51621); BMF(90427); BAHD1(22893); CSK(1445); IGF1R |
| | (3480); PIGQ(9091); KIAA1924(197335); CCDC78(124093); C1QTNF8(390664); NME3(4832); TBL3(10607); TSC2 |
| | (7249); TRAF7(84231); CCNF(899); TNFRSF12A(51330); MMPL1(4328); N-PAC(84656); GPRC5B(51704); PLK1(5347); |
| | MAPK3(5595); FBXL19(54620); POLR2C(5432); TRADD(8717); LOC283849(283849); E2F4(1874); SLC12A4(6560); |
| | SLC7A6(9057); SMPD3(55512); TERF2(7014); KIAA0513(9764); PCOLN3(5119); PRDM7(11105); PARD6A(50855); |
| | ALOX15B(247); PAFAH1B1(5048); DHX33(56919); VAMP2(6844); GAS7(8522); CORO6(84940); GOSR1(9527); |
| | RASL10B(91608); DUSP3(1845); UBTF(7343); SLC4A1(6521); MAPT(4137); CDK5RAP3(80279); CROP(51747); MSI2 |
| | (124540); ERN1(2081); PRKCA(5578); SPHK1(8877); TMC6(11322); BIRC5(332); SOCS3(9021); FLJ21865(64772); |
| | CARD14(79092); CIDEA(1149); CABLES1(91768); MAPRE2(10982); BCL2(596); TXNL4A(10907); APC2(10297); MKNK2 |
| | (2872); C19orf36(113177); FZR1(51343); MATK(4145); DAPK3(1613); ZBTB7A(51341); TNFAIP8L1(126282); MAPK7 |
| | (5609); CDKN2D(1032); TNPO2(30000); GADD45GIP1(90480); BTBD14B(112939); DPF1(8193); MAP3K10(4294); |
| | AKT2(208); PRX(57716); AXL(558); ARHGEF1(9138); ERF(2077); IGSF4C(199731); APOE(348); SPHK2(56848); |
| | RPS11(6205); SPIB(6689); LOC284361(284361); SAPS1(22870); HMG20B(10362); GRLF1(2909); CSNK2A1(1457); |
| | TM9SF4(9777); E2F1(1869); GGTL3(2686); LPIN3(64900); MYBL2(4605); DIDO1(11083); BIRC7(79444); ARFGAP1 |
| | (55738); PLAC4(191585); FLJ41733(400870); C21orf123(378832); BCL2L13(23786); TSSK2(23617); DGCR14(8220); |
| | LOC128977(128977); SEPT5(5413); HIC2(23119); MAPK1(5594); SMARCB1(6598); ADORA2A(135); MN1(4330); GAS2L1 |
| | (10634); CABP7(164633); KIAA1904(114794); CBX6(23466); CBX7(23492); MGAT3(4248); PPARA(5465); FLJ41993 |
| | (400935); SAPS2(9701); SBF1(6305); MAPK8IP2(23542); MGC3731(79159); PCTK1(5127); SMC1L1(8243); :SNX12 |
| | (29934); BTK(695); AGTR2(186); ZDHHC9(51114); EMD(2010); AFF2(2334); |
| 2 | E2F2(1870); CCDC21(64793); SDC3(9672); RBBP4(5928); KIAA0319L(79932); C1orf84(149469); AGBL4(84871); CELSR2 |
| | (1952); RAP1A(5906); SV2A(9900); C1orf60(65123); SHC1(6464); UBQLN4(56893); MEF2D(4209); BCAN(63827); |
| | ISF4B(57863); NAV1(89796); PPP1R12B(4660); RIPK5(25778); C1orf95(375057); YPEL5(51646); TEX261(113419); |
| | KCNIP3(30818); IMP4(92856); PNKD(25953); ATG9A(79065); COPS7B(64708); ATP2B2(491); HEMK1(51409); RAB6B |
| | (51560); SLCO2A1(6578); SLC26A1(10861); EVC(2121); FLJ46481(389197); SETD7(80854); KIAA1909(153478); |
| | PCDH1(5097); PDGFRB(5159); NDST1(3340); CPLX2(10814); N4BP3(23138); RNF5(6048); PBX2(5089); BAK1(578); |
| | PACSIN1(29993); MOCS1(4337); FOXP4(116113); MGG45491(221416); TRAM2(9697); PSCD3(9265); AQP1(358); |
| | POM121(9883); CASP2(835); VIPR2(7434); C9orf25(203259); TPM2(7169); NTRK2(4915); C9orf47(286223); ST6GALNAC6 |
| | (30815); SPOCK2(9806); SH3PXD2A(9644); VAX1(11023); MTG1(92170); SPRN(503542); C11orf11(747); PACS1 |
| | (55690); LOC399947(399947); BCL9L(283149); CACNA1C(775); FLJ20489(55652); FMNL3(91010); CBX5(23468); |
| | MYL6(4637); GLS2(27165); CTDSP2(10106); DDX54(79039); B4GALNT1(2583); SLC8A3(6547); PCNX(22990); |
| | KIAA0125(9834); BMF(90427); TLN2(83660); PML(5371); NEIL1(79661); ABHD2(11057); EMP2(2013); UBPH(56061); |
| | SBK1(388228); ATP2A(487); N4BP1(9683); CCL22(6367); POLR2C(5432); AFG3L1(172); SMG6(23293); GAS7(8522); |
| | C17orf63(55731); ACACA(31); MLLT6(4302); LASP1(3927); WIRE(147179); PTRF(284119); MAPT(4137); PNPO(55163); |
| | NGFR(4804); NXPH3(11248); LIMD2(80774); CDC42EP4(23580); C17orf28(283987); SEPT9(10801); PCYT2(5833); |
| | MAFG(4097); RNF165(494410); FZR1(51343); TUBB4(10382); PDE4A(5141); NFIX(4784); RAB8A(4218); ZNF585A |
| | (199704); APOE(348); DMWD(1762); SHANK1(50944); MGC2752(65996); LOC389286(389286); C20orf27(54976); |
| | SOX12(6666); ProSAPiP1(9762); P$$MS4(140730); DIDO1(11083); BTBD4(140685); TRPM3(7226); POFUT2(23275); |
| | MICAL-L1(85377); MGAT3(4248); TEF(7008); NFAM1(150372); TTLL12(23170); SSX4B(548313); SYN1(6853); SSX |

TABLE 2-2

| | |
|---|---|
| | 6(280657); RP11-114H20.1(401589); SSX2(6757); SMC1L1(8243); |
| 3 | TNFRSF14(8764); NBL1(4681); CDC42(998); LIN28(79727); KHDRBS1(10657); JMJD2A(9682); GFI1(2672); CDC14A |
| | (8556); AMIGO1(57463); MCL1(4170); RORC(6097); MEF2D(4209); PEA15(8682); UHMK1(127933); ADORA1(134); |
| | NUCKS1(64710); TP53BP2(7159); C1orf69(200205); KIF21B(23046); RHOB(388); KCNK3(3777); PRKCE(5581); MXD1 |
| | (4084); KCNIP3(30818); BRRN1(23397); BBS5(129880); CFLAR(8837); CASP10(843); CTDSP1(58190); INHA(3623); |
| | PAX3(5077); HDAC4(9759); KIF1A(547); SRGAP3(9901); VHL(7428); RBMS3(27303); AXUD1(64651); ZNF651(92999); |
| | RBM15B(29890); MAGI1(9223); FXR1(8087); TP73L(8626); PPP1R2(5504); G3BP2(9908); PRLR(5618); FLJ39155 |
| | (133584); ITGA2(3673); RAD17(5884); SEMA6A(57556); RAD50(10111); PHF15(23338); HNRPA0(10949); CDC23 |
| | (8697); CAMK2A(815); CD74(972); NDST1(3340); DDR1(780); ZBTB12(221527); SKIV2L(6499); SYNGAP1(8831); BAK1 |
| | (578); MAPK13(5603); ZFAND3(60685); TRAM2(9697); FOXO3A(2309); L3MBTL3(84456); STX7(8417); TNFAIP3 |
| | (7128); PDE10A(10846); PDCD2(5134); TRIAD3(54476); SCRN1(9805); IGFBP3(3486); EGFR(1956); YWHAG(7532); LEP |
| | (3952); FASTK(10922); TNFRSF10B(8795); TNFRSF10A(8797); TRIM35(23087); CLU(1191); KIF13B(23303); DUSP4 |
| | (1846); UBE2V2(7336); MTSS1(9788); CDC37L1(55664); CDK9(1025); C9orf140(89958); GPR107(57720); ADARB2 |
| | (105); SPOCK2(9806); NOLC1(9221); TCF7L2(6934); C10orf46(143384); TIAL1(7073); LRRC56(115399); IGF2(3481); |
| | IPO7(10527); API5(8539); PRPF19(27339); GANAB(23193); CDCA5(113130); DPF2(5977); SSSCA1(10534); NPAS4 |
| | (266743); PPP1CA(5499); FGF4(2249); SESN3(143686); YAP1(10413); PPP2R1B(5519); FLJ25530(220296); EI24 |
| | (9538); ARF3(377); C12orf22(81566); LOC401720(401720); GDF11(10220); SUDS3(64426); HNRPA1(3178); LATS2 |
| | (26524); FLJ40296(122183); POU4F1(5457); BCL2L2(599); JPH4(84502); ERH(2079); VASH1(22846); CHES1(1112); |
| | ANKRD9(122416); AKT1(207); KLF13(51621); TPM1(7168); CSK(1445); IGF1R(3480); CCDC78(124093); C1QTNF8 |
| | (390664); TSC2(7249); TRAF7(84231); TNFRSF12A(51330); ERN2(10595); MAPK3(5595); FBXL19(54620); CIAPIN1 |
| | (57019); CMTM4(146223); TRADD(8717); LOC283849(283849); SLC12A4(6560); SMPD3(55512); KIAA0513(9764); CDT1 |
| | (81620); RPL13(6137); ALOX15B(247); MNT(4335); PAFAH1B1(5048); DLG4(1742); TNFSF12(8742); GOSR1(9527); |
| | NF1(4763); RAB11FIP4(84440); RASL10B(91608); NR1D1(9572); HDAC5(10014); CRHR1(1394); MAPT(4137); |
| | NGFR(4804); SPHK1(8877); TMC6(11322); SOCS3(9021); PCYT2(5833); CIDEA(1149); CABLES1(91768); PHLPP(23239); |
| | BCL2(596); TXNL4A(10907); FZR1(51343); ZBTB7A(51341); SEMA6B(10501); TNFSF9(8744); CDC37(11140); |
| | CDKN2D(1032); ILF3(3609); DNM2(1785); RAB3D(9545); LPPR2(64748); ELAVL3(1995); TNPO2(30000); BTBD14B |
| | (112939); F2RL3(9002); ELL(8178); DPF1(8193); MAP3K10(4294); ERF(2077); IGSF4C(199731); BCL3(602); APOE |
| | (348); FOSB(2354); BBC3(27113); SLC8A2(6543); BAX(581); CD37(951); BCL2L12(83596); PPP2R1A(5518); MYADM |
| | (91663); CACNG7(59284); U2AF2(11338); ZNF264(9422); ZNF17(7565); GRLF1(2909); SCRT2(85508); E2F1(1869); |
| | UBE2V1(7335); CABLES2(81928); DIDO1(11083); ADARB1(104); BCL2L13(23786); DGCR14(8220); SEPT5(5413); |
| | MAPK1(5594); SMARCB1(6598); MN1(4330); GAS2L1(10634); LIF(3976); MCM5(4174); KIAA1904(114794); CARD10 |
| | (29775); C22orf5(25829); CBX6(23466); CBX7(23492); TCF20(6942); PHF21B(112885); PPARA(5465); SAPS2(9701); |
| | SBF1(6305); MAPK8IP2(23542); RS1(6247); PCTK1(5127); ELK1(2002); ZNF81(347344); SMO1L1(8243); RP1-112K5.2 |
| | (90121); MLLT7(4303); BRWD3(254065); SEPT6(23157); MTCP1(4515); AFF2(2334); |
| 4 | BOK(666) |
| 5 | GAS7(8522) |
| 6 | PI15(51050) |
| 7 | TAGLN(6876) |
| 8 | SAMD11(148398); CDC2L2(985); TP73(7161); HES2(54626); THAP3(90326); TNFRSF9(3604); LDLRAP1(26119); NUDC |
| | (10726); RCC1(1104); TRIM62(55223); KIAA0319L(79932); MPL(4352); CDC20(991); SH3GLB1(51100); PROK1 |
| | (84432); KCNJ9(3765); DEDD(9191); GPR161(23432); TNNI1(7135); TMEM63A(9725); C1Oorf95(375057); C1orf69(200205); |
| | MTR(4548); RHOB(388); CGREF1(10669); BRRN1(23397); BCL2L11(10018); WDR33(55339); PLEKHB2(55041); |
| | MCM6(4175); KIF1A(547); RAF1(5894); AXUD1(64651); RASSF1(11186); NEK4(6787); TMEM110(375346); CLSTN2 |
| | (64084); LOC285382(285382); LETM1(3954); SH3BP2(6452); HD(3064); BTC(685); UNC5C(8633); NEK1(4750); TPPP |
| | (11076); ERBB2IP(55914); MRPS27(23107); CDC23(8697); PDGFRB(5159); HMP19(51617); DHX16(8449); AIF1(199); |
| | MAPK13(5603); CDKN1A(1026); LATS1(9113); ESR1(2099); RPS6KA2(6196); LOC90639(90639); MAD1L1(8379); |
| | FOXK1(221937); TRIAD3(54476); HDAC9(9734); INHBA(3624); TMED4(222068); ADCY1(107); IGFBP3(3486); YWHAG |
| | (7532); KIAA0773(9715); LOC155060(155060); RBM33(155435); MAFK(7975); CLN8(2055); BIN3(55909); TNFRSF10C |
| | (8794); CLU(1191); BAG1(573); SHB(6461); C9orf47(286223); TRIM14(9830); TRAF1(7185); ASB6(140459); FNBP1 |
| | (23048); ABL1(25); TSC1(7248); QSCN6L1(169714); UNC5B(219699); C10orf104(119504); FAS(355); LZTS2(84445); |
| | SUFU(51684); SPRN(503542); IGF2(3481); KCNQ1(3784); WT1(7490); SLC15A3(51296); LOC144097(144097); |
| | CDC42EP2(10435); BRMS1(25855); CCND1(595); FADD(8772); LRRC51(220074); GAB2(9846); SESN3(143686); CASP5 |
| | (838); EXPH5(23086); TAGLN(6876); ETV6(2120); FLJ20489(55652); HDAC7A(51564); MCRS1(10445); FMNL3 |
| | (91010); FAIM2(23017); CBX5(23468); RBMS2(5939); BTG1(694); SOCS2(8835); GAS2L3(283431); TCF1(6927); C12orf43 |
| | (64897); DIABLO(56616); SCARB1(949); LATS2(26524); WDFY2(115825); LTB4R2(56413); SPTB(6710); RAB15 |
| | (376267); LTBP2(4053); VASH1(22846); SLC24A4(123041); TRAF3(7187); PACS2(23241); KIAA0125(9834); FLJ43339 |
| | (388115); CA12(771); DAPK2(23604); PDCD7(10081); CLN6(54982); ARNT2(9915); C15orf38(348110); IDH2(3418); |
| | IGF1R(3480); LOC440313(440313); LRRK1(79705); RAB40C(57799); KIAA1924(197335); CCDC78(124093); CLCN7 |
| | (1186); TRAF7(84231); CCNF(899); PKMYT1(9088); BTBD12(84464); DNAJA3(9093); C16orf5(29965); GSPT1(2935); |
| | XYLT1(64131); RPS15A(6210); PLK1(5347); SBK1(388228); STX1B2(112755); FTS(64400); GNAO1(2775); LIN1 |

TABLE 2-3

| | |
|---|---|
| | 0(80262); LOC283849(283849); RANBP10(57610); SLC12A4(6560); SMPD3(55512); KIAA0513(9764); FLJ45121(400556); |
| | CDT1(81620); CDK10(8558); ANAPC11(51529); ALOX15B(247); TUSC5(286753); HIC1(3090); TNFSF12(8742); |
| | GAS7(8522); MFAP4(4239); WSB1(26118); POLDIP2(26073); HCP1(113235); EZH1(2145); MAPT(4137); NFE2L1 |
| | (4779); CROP(51747); KIAA0195(9772); EXOC7(23265); TBC1D16(125058); BAIAP2(10458); DUS1L(64118); MAPK4 |
| | (5596); DCC(1630); MBP(4155); HMHA1(23526); ZBTB7A(51341); MAP2K7(5609); ELAVL3(1995); PRDX2(7001); F2RL3 |
| | (9002); KIAA0892(23383); ZNF43(7594); MGC20255(90324); APOE(348); LOC400707(400707); CARD8(22900); |
| | RPS11(6205); HKR2(342945); SNPH(9751); KCNK15(60598); CSE1L(1434); UBE2V1(7335); LAMA5(3911); DIDO1(11083); |
| | CHRNA4(1137); AGPAT3(56894); TRPM2(7226); UBE2G2(7327); COL18A1(80781); C22orf25(128989); HTF9C |
| | (27037); MAPK1(5594); PPM1F(9647); SMARCB1(6598); GAS2L1(10634); NF2(4771); SSTR3(6753); TOB2(10766); |
| | SEPT3(55964); PPARA(5465); GTSE1(51512); ADM2(79924); APOL6(80830); ZC3H12B(340554); RNF12(51132); MECP2 |
| | (4204); |
| 9 | GM632(57473) |
| 10 | CEBPA(1050) |
| 11 | RBPSUH(3516) |
| 12 | BOK(666) |
| 13 | PACS2(23241) |
| 14 | KIF1B(23095); SPATA6(54558); LEPR(3953); GBP6(163351); LRRC8C(84230); ABCD3(5825); AGL(178); CDC14A(8556); |
| | UHMK1(127933); RGS4(5999); YOD1(55432); NCOA1(8648); CRIM1(51232); FLJ13910(64795); HNMT(3176); LOC339745 |
| | (339745); ITGA4(3676); PGAP1(80055); CREB1(1385); TRPM8(79054); MGAT4A(11320); IGSF4D(253559); |
| | VGLL3(389136); ZPLD1(131368); IFT57(55081); NCK1(4690); DBR1(51163); DHX36(170506); PPAT(5471); TMPRSS11B |
| | (132724); RASSF6(166824); CXCL5(6374); PAQR3(152559); FGF5(2250); AFF1(4299); DAPP1(27071); DNAJB14 |
| | (79982); BBS7(55212); SLC7A11(23657); FLJ38482(201931); ASB5(140458); IL7R(3575); LIFR(3977); FLJ21657 |
| | (64417); HCN1(348980); ITGA2(3673); ELOVL7(79993); R7BP(401190); TNPO1(3842); POLK(51426); HOMER1(9456); |
| | LOC153364(153364); ACSL6(23305); FLJ37562(134553); DCDC2(51473); ICK(22858); ASCC3(10973); C6or68(116150); |
| | AHI1(54806); TXLNB(167838); PDE10A (10846); MGC42090(256130); CREB5(9586); LOC441257(441257); STEAP4 |
| | (79689); STEAP2(261729); BCAP29(55973); WNT16(51384); NDUFA5(4698); CALD1(800); PLAG1(5324); YTHDF3 |
| | (253943); PMP2(5375); ANGPT1(284); TRPS1(7227); KLHL9(55958); TRPM6(140803); FRMD3(251019); NTRK2 |
| | (4915); C9orf5(23731); PAPPA(5069); RP11-142I17.1(26095); PLEKHK1(219790); FAS(355); IFIT5(24138); ADD3(120); |
| | PGM2L1(283209); HBXAP(51773); PANX1(24145); SESN3(143686); KIAA0999(23387); CBL(867); KRAS(3845); |
| | STK38L(23012); MON2(23041); LIN7A(8825); SLC41A2(84102); TMEM132B(114795); MGC40069(348035); KIAA1333 |
| | (55632); MIPOL1(145282); C14orf138(79609); SOS2(6655); PIGH(5283); PCNX(22990); GTF2A1(2957); SEL1L(6400); |
| | UBE3A(7337); PLDN(26258); MYO5A(4644); USP31(57478); NF1(4763); MSI2(124540); C18orf1(753); DSG2(1829); |
| | SMAD2(4087); FVT1(2531); DOK6(220164); NETO1(81832); ZNF568(374900); BMP2(650); RAB22A(57403); BTBD4 |
| | (140685); CXADR(1525); PKNOX1(5316); KAL1(3730); DMD(1756); SCML1(6322); |
| 15 | RAB40C(57799) |
| 16 | NFAT5(10725) |
| 17 | LAMP1(3916) |
| 18 | PRX(57716) |
| 19 | GIPC3(126326) |
| 20 | TNFRSF1B(7133); RCC2(55920); TTMB(399474); FABP3(2170); GIPC2(54810); CDC14A(8556); CDC42SE1(56882); |
| | DEDD(9191); FASLG(356); ZBTB41(360023); TNNI1(7135); LPGAT1(9926); C1orf140(400804); NID1(4811); AKT3(10000); |
| | C1orf173(127254); SOX11(6664); CAD(790); FOSL2(2355); REEP1(65055); IL1RL1(9173); IL1A(3552); PTD004 |
| | (29789); CASP10(843); CREB1(1385); SEPT2(4735); ZAK(51776); RBMS3(27303); EIF4E3(317649); KALRN(8997); |
| | SLO9A9(285195); SLC2A2(6514); TNFSF10(8743); DKFZP686A01247(22998); GABRA4(2557); FLJ38991(285521); |
| | SNCA(6622); CASP6(839); ADCY2(108); PRLR(5618); LOC153561(153561); ZBED3(84327); APC(324); DNAJC18(202052); |
| | PCDHGB4(8641); UNC5A(90249); PRPF4B(8899); FLJ45422(441140); FKBP5(2289); RPL7L1(285855); SYNCRIP |
| | (10492); PLAGL1(5325); RABGEF1(27342); PODXL(5420); ABCF2(10061); REXO1L1(254958); DLGAP2(9228); |
| | EFHA2(286097); UNC5D(137970); CHD7(55636); MTFR1(9650); UBE2W(55284); ATP6V0D2(245972); CCNE2(9134); |
| | PTPLAD2(401494); SMU1(55234); TLR4(7099); MAP3K8(1326); C10orf54(64115); KIF11(3832); TIAL1(7073); GAS2 |
| | (2620); SSSCA1(10534); PGM2L1(283209); HBXAP(51773); NDUFC2(4718); DLG2(1740); MTMR2(8898); SNF1LK2 |
| | (23235); CBL(867); LOC283174(283174); KRAS(3845); CBX5(23468); RBMS2(5939); TMCC3(57458); KIAA0152(9761); |
| | TNFRSF19(55504); TFDP1(7027); RHOJ(57381); FLJ39531(400360); LOC405753(405753); PDCD7(10081); RAB11A |
| | (8766); AP3S2(10239); IQGAP1(8826); PHLPPL(23035); CROP(51747); WBP2(23558); DLGAP1(9229); C18orf1 |
| | (753); AQP4(361); SMAD2(4087); DOK6(220164); TNFSF14(8740); DNAJB1(3337); APOE(348); ZNF347(84671); RNF24 |
| | (11237); TP53INP2(58476); RBL1(5933); ABCC13(150000); NF2(4771); SYN3(8224); RAXLX(91464); ATRX(546); |

TABLE 2-4

| | CD40LG(959); AFF2(2334); |
|---|---|
| 21 | DFFA(1676); TNFRSF1B(7133); NBL1(4681); NUDC(10726); SESN2(83667); RCC1(1104); TTMB(399474); KIAA0319L |
| | (79932); NFYC(4802); TESK2(10420); CDC7(8317); RAP1A(5906); NRAS(4893); SNX27(81609); CD84(8832); UHMK1 |
| | (127933); QSCN6(5768); PPP1R12B(4660); CCNL2(81669); E2F6(1876); RBJ(51277); KHK(3795); OXER1(165140); |
| | TGFA(7039); KCNIP3(30818); BCL2L11(10018); ANAPC1(64682); RIF1(55183); CASP10(843); OGG1(4968); FANCD2 |
| | (2177); STAG1(10274); CHRD(8646); TP73L(8626); PCGF3(10336); CD38(952); EREG(2069); BTC(685); SEPT11(55752); |
| | KIAA1909(153478); UNG2(10309); F2R(2149); FGF1(2246); RNF130(55819); RIPK1(8737); LY86(9450); E2F3(1871); |
| | MAPK13(5603); TRAM2(9697); DST(667); SASH1(23328); FLJ34503(285759); MGC11257(84310); TRIAD3(54476); |
| | INHBA(3624); PURB(5814); CALN1(83698); CDK6(1021); CASP2(835); PSD3(23362); POLR3D(661); BIN3(55909); |
| | TNFRSF10B(8795); BNIP3L(665); CLU(1191); UNC5D(137970); UBE2V2(7336); STK3(6788); KIAA1875(340390); GAS1 |
| | (2619); SEMA4D(10507); FGD3(89846); TRIM14(9830); SPTAN1(6709); ADAMTS13(11093); CARD9(64170); ZMYND11 |
| | (10771); ZWINT(11130); SIRT1(23411); UNC5B(219699); LZTS2(84445); SUFU(51684); C10orf46(143384); HRAS |
| | (3265); PARVA(55742); HIPK3(10114); DAK(26007); DPF2(5977); DLG2(1740); SCN4B(6330); MLL(4297); H2AFX |
| | (3014); SRPR(6734); RAD52(5893); CCND2(894); TNFRSF7(939); CDKN1B(1027); IAPP(3375); HDAC7A(51564); FAIM2 |
| | (23017); C12orf22(81566); PDE1B(5153); DDIT3(1649); CENTG1(116986); PCTK2(5128); APAF1(317); HRK(8739); |
| | EP400NL(347918); TNFRSF19(55504); RB1(5925); KLF12(11278); CUL4A(8451); ACIN1(22985); BCL2L2(599); JPH4 |
| | (84502); MNAT1(4331); PSEN1(5663); TGFB3(7043); VASH1(22846); PPP1R13B(23368); MAPK6(5597); FLJ38723 |
| | (255180); KIF23(9493); IGF1R(3480); ALPK3(57538); RAB40C(57799); TRAF7(84231); PKMYT1(9088); DNAJA3 |
| | (9093); GSPT1(2935); PLK1(5347); ERN2(10595); PRRT2(112476); RNF40(9810); FTS(64400); CIAPIN1(57019); CTCF |
| | (10664); SMPD3(55512); CDK10(8558); ANAPC11(51529); MNT(4335); TNFSF12(8742); GAS7(8522); HCP1(113235); |
| | CDK5RAP3(80279); C17orf73(55018); MPO(4353); ABC1(63897); BIRC5(332); EMILIN2(84034); GNAL(2774); CABLES1 |
| | (91768); PHLPP(23239); BCL2(596); FZR1(51343); DPF1(8193); SIRT2(22933); SAMD4B(55095); LYPD5(284348); |
| | APOE(348); OPA3(80207); BBC3(27113); BAX(581); FLJ38288(284309); GRLF1(2909); PLCB1(23236); CSE1L |
| | (1434); ZGPAT(84619); MAPK1(5594); NF2(4771); CARD10(29775); NPTXR(23467); TNRC6B(23112); TOB2(10766); |
| | FIGF(2277); SMC1L1(8243); SEPT6(23157); MECP2(4204); |
| 22 | CDC2L2(985); TNFRSF14(8764); CHD5(26038); CDC42(998); E2F2(1870); WASF2(10163); RCC1(1104); KHDRBS1 |
| | (10657); LCK(3932); KIAA0319L(79932); RIMS3(9783); CDC20(991); CDKN2C(1031); NOTCH2(4853); CKS1B(1163); |
| | C1orf21(81563); PPP1R12B(4660); SYT2(127833); ADORA1(134); PIK3C2B(5287); IL10(3586); IL24(11009); PLXNA2 |
| | (5362); VANGL1(81839); KIF21B(23046); RHOB(388); MAPRE3(22924); TGFA(7039); HK2(3099); BRRN1(23397); INHBB |
| | (3625); ERCC3(2071); PROC(5624); TAIP-2(80034); TLK1(9874); BARD1(580); TNS1(7145); PAX3(5077); HDAC4 |
| | (9759); BOK(666); ZAK(51776); ZNF651(92999); RASSF1(11186); HEMK1(51409); RBM15B(29890); RNF7(9616); TP73L |
| | (8626); FAM43A(131583); LETM1(3954); HD(3064); EREG(2069); CCNG2(901); TPPP(11076); DAP(1611); PRKAA1 |
| | (5562); RPL37(6167); ERBB2IP(55914); APC(324); MCC(4163); HDAC3(8841); CPLX2(10814); NSD1(64324); IER3 |
| | (8870); C2(717); BAK1(578); IHPK3(117283); PACSIN1(29993); MAPK13(5603); CDKN1A(1026); TREML2(79865); PTK7 |
| | (5754); SRF(6722); VEGF(7422); SUPT3H(8464); IL17(3605); FOXO3A(2309); HECA(51696); ELMO1(9844); FOXK1 |
| | (221937); TRIAD3(54476); HDAC9(9734); ADCY1(107); IGFBP3(3486); EGFR(1956); FLJ37538(222950); CASP2(835); |
| | KIAA0773(9715); VIPR2(7434); LZTS1(11178); POLR3D(661); BIN3(55909); TNFRSF10A(8797); TRIM35(23087); |
| | PTK2B(2185); DUSP4(1846); UNC5D(137970); TERF1(7013); TP53INP1(94241); LYNX1(66004); MGC21881(389741); |
| | UHRF2(115426); CDKN2B(1030); TAF1L(138474); BAG1(573); FANCG(2189); SEMA4D(10507); TNFSF15(9966); TNFSF8 |
| | (944); TRAF1(7185); DAB2IP(153090); FAM102A(399665); ADARB2(105); ZWINT(11130); SIRT1(23411); SGPL1 |
| | (8879); C10orf54(64115); CHST3(9469); KIF11(3832); LZTS2(84445); FGF8(2253); C10orf76(79591); SUFU(51684); |
| | PDCD11(22984); NEURL(9148); BAG3(9531); FAM53B(9679); APBB1(322); MDK(4192); CDCA5(113130); DPF2(5977); |
| | CLCF1(23529); PPP1CA(5499); FADD(8772); RAB30(27314); SCN2B(6327); H2AFX(3014); EI24(9538); CDCA3 |
| | (83461); BCAT1(586); KRAS(3845); HNDAC7A(51564); MCRS1(10445); TEGT(7009); FAIM2(23017); CBX5(23468); PDE1B |
| | (5153); ITGA7(3679); MYL6(4637); CRADD(8738); FOXO1A(2308); RFP2(10206); POU4F1(5457); LOC283487(283487); |
| | BCL2L2(599); RGS6(9628); PSEN1(5663); LTBP2(4053); NEK9(91754); VASH1(22846); TRAF3(7187); BAG5 |
| | (9529); AKT1(207); JAG2(3714); BMF(90427); FLJ43339(388115); FLJ38723(255180); SNX1(6642); PDCD7(10081); |
| | CSK(1445); ABHD2(11057); IGF1R(3480); NME3(4832); TSC2(7249); TRAF7(84231); CCNF(899); TNFRSF12A(51330); |
| | ERN2(10595); P8(26471); PRRT2(112476); CYLD(1540); FTS(64400); LOC283849(283849); E2F4(1874); CTCF(10664); |
| | SLC12A4(6560); KIAA0513(9764); PCOLN3(5119); ABR(29); HIC1(3090); PAFAH1B1(5048); GARNL4(23108); |
| | TNFSF12(8742); TP53(7157); GAS7(8522); TOM1L2(146691); POLDIP2(26073); TRAF4(9618); NF1(4763); MLLT6(4302); |
| | PTRF(284119); BRCA1(672); TBKBP1(9755); IGF2BP1(10642); PHB(5245); NGFR(4804); CROP(51747); DYNLL2 |
| | (140735); MPO(4353); PRKCA(5578); CDK3(1018); SOCS3(9021); BAIAP2(10458); CABLES1(91768); RNF165(494470); |
| | KIAA0427(9811); BCL2(596); NFATC1(4772); SF3A2(8175); GNG7(2788); FZR1(51343); PIN1(5300); CDC37(11140); |
| | TNPO2(30000); LPHN1(22859); SIRT2(22933); IGSF4C(199731); FOSB(2354); DMWD(1762); BBC3(27113); RPS11 |
| | (6205); PPP2R1A(5518); GRLF1(2909); ZNF343(79175); C20orf116(65992); E2F1(1869); CEP250(11190); PPP1R16B |
| | (26051); ZHX3(23051); RIMS4(140730); STK4(6789); DIDO1(11083); TNFRSF6B(8771); ZGPAT(84619); APP |
| | (351); ADARB1(104); LSS(4047); HIC2(23119); MAPK1(5594); PPM1F(9647); MIF(4282); ADORA2A(135); NF2(4171); |
| | KIAA1904(114794); MGAT3(4248); ZC3H7B(23264); NHP2L1(4809); SEPT3(55964); GTSE1(51512); PCTK1(5127); IQSEC2 |
| | (23096); TMEM28(27112); MLLT7(4303); RP6-213H19.1(51765); CD40LG(959); HCFC1(3054); PRKY(5616); |
| 23 | ANKRD36(375248) |

TABLE 2-5

| | |
|---|---|
| 24 | NFIX(4784) |
| 25 | SDF4(51150); B3GALT6(126792); UBE2J2(118424); CENTB5(116983); SKI(6497); C1orf93(127281); SPSB1(80176); |
| | PIK3CD(5293); TINAGL1(64129); KIAA0319L(79932); IGSF4B(57863); ZNF648(127665); WNT3A(89780); OR2W5(441932); |
| | OR2C3(81472); ATAD3C(219293); INPP5D(3635); ANKRD23(200539); RAMP1(10267); RIS1(25907); PH-4(54681); |
| | IHPK1(9807); PLXNA1(5361); CLDN18(51208); LIPH(200879); GP5(2814); CPLX1(10815); MAEA(10296); RGS12 |
| | (6002); LOC93622(93622); DCAMKL2(166614); DUX4(22947); AHRR(57491); TPPP(11076); CTNND2(1501); PITX1 |
| | (5307); PCDHA1(56147); PCDHA2(56146); PCDHA3(56145); PCDHA4(56144); PCDHA5(56143); PCDHA6(56142); |
| | PCDHA7(56141); PCDHA8(56140); PCDHA9(9752); PCDHA10(56139); PCDHA11(56138); PCDHA12(56137); PCDHA13 |
| | (56136); PCDHAC1(56135); PCDHAC2(56134); SH3PXD2B(285590); UNC5A(90249); DBN1(1627); LOC51149(51149); |
| | C6orf85(63027); C6orf145(221749); TULP1(7287); COL12A1(1303); TCF21(6943); RPS6KA2(6196); VGF(7425); |
| | BCAP29(55973); EPHA1(2041); ATG9B(285973); LRCH4(4034); KIAA1688(80728); CDKN2B(1030); B4GALT1(2683); |
| | KLF9(687); IPPK(64768); DAB2IP(153090); BRD3(8019); PTGDS(5730); FLJ45224(401562); C9orf140(89958); MGC61598 |
| | (441478); LOC399706(399706); C10orf114(399726); LOC439985(439985); C10orf116(10974); FRAT1(10023); |
| | MARVELD1(83742); C10orf39(282973); STK32C(282974); INPP5A(3632); FBXO3(26273); CTTN(2017); DLG2(1740); |
| | DKFZp547C195(257160); KIRREL3(84623); HOM-TES-103(25900); DDN(23109); METTL7A(25840); HOXC13 |
| | (3229); CDK4(1019); IPF1(3651); C13orf21(387923); SLITRK5(26050); ATP11A(23250); GPR68(8111); PPP2R5C(5527); |
| | BRF1(2972); PACS2(23241); C15orf37(283687); UBE2I(7329); IFT140(9742); CASKIN1(57524); ZNF213(7760); ZNF500 |
| | (26048); SEPT1(1731); FBXL19(54620); GPT2(84706); MON1B(22879); MGC51025(353149); TRAF4(9618); ANKRD13B |
| | (124930); CCDC55(84081); RAB11FIP4(84440); LHX1(3975); PCGF2(7703); HLF(3131); KIAA0195(9772); C1QTNF1 |
| | (114897); HOXB8(3218); C18orf43(10650); RNF165(494470); KIAA0427(9811); CDH20(28316); TXNL4A(10907); |
| | WDR18(57418); MKNK2(2872); MOBKL2A(126308); LMNB2(84823); DAPK3(1613); TNFAIP8L1(126282); JMJD2B |
| | (23030); TIMM44(10469); RAVER1(125950); NFIX(4784); F2RL3(9002); ZBTB32(27033); RASGRP4(115727); CAPN12 |
| | (147968); PSCD2(9266); SPHK2(56848); BCAT2(587); LIN7B(64130); PRKCG(5582); LENG8(114823); LOC352909 |
| | (352909); ICAM4(3386); EEF2(1938); GRLF1(2909); UBOX5(22888); BLCAP(10904); SPATA2(9825); D21S2056E |
| | (8568); POFUT2(23275); SEPT5(5413); TBX1(6899); LOC150223(150223); BRD1(23774); EDA(1896); FAM11A(84548); |
| | CHM(1121); |
| 26 | ZFP41(286128) |
| 27 | PRDM16(63976) |
| 28 | CLASP1(23332) |
| 29 | ZNF655(79027) |
| 30 | FAIM2(23017) |
| 31 | ZGPAT(84619) |
| 32 | E2F2(1870); CCDC21(64793); LAPTM5(7805); ZBTB8(127557); MGC33556(339541); RAB3B(5865); CDC42SE1(56882); |
| | UHMK1(127933); IL24(11009); TRAF5(7188); C1orf95(375057); VANGL1(81839); SFXN5(94097); CASP10(843); |
| | CD28(940); COL4A3(1285); FLJ10996(54520); GRM7(2917); SRGAP3(9901); PH-4(54681); RASSF1(11186); PRICKLE2 |
| | (166336); ST3GAL6(10402); PCNP(57092); RNF7(9616); HIP2(3093); TMPRSS11E(28983); OSMR(9180); F2R(2149); |
| | TICAM2(353376); SEMA6A(57556); N4BP3(23138); ELOVL2(54898); IHPK3(117283); CCND3(896); HSP90AB1 |
| | (3326); PAQR8(85315); CCNC(892); ATG5(9474); FOXO3A(2309); SLC22A3(6581); ELMO1(9844); NUDCD3(23386); |
| | CALN1(83698); BCAP29(55973); MSR1(4481); DUSP4(1846); UNC5D(137970); TACC1(6867); UBE2V2(7336); YTHDF3 |
| | (253943); EXT1(2131); LRRC6(23639); ST3GAL1(6482); C8orf30A(51236); MGC21881(389741); KIAA1815(79956); |
| | RECK(8434); SEMA4D(10507); TNFSF8(944); C10orf9(219771); ARID5B(84159); SGPL1(8879); HIF1AN(55662); |
| | FAM26C(255022); C10orf137(26098); FLJ46154(196296); TRAF6(7189); ACAT1(38); SNF1LK2(23235); CDON(50937); |
| | KCNA6(3742); PTMS(5763); BCAT1(586); KRAS(3845); HDAC7A(51564); TEGT(7009); C12orf22(81566); ZBTB39 |
| | (9880); FLJ11259(55332); THRAP2(23389); RFP2(10206); STRN3(29966); C14orf118(55668); UBE3A(7337); KLF13 |
| | (51621); Gcom1(145781); THSD4(79875); GRIN2A(2903); CTCF(10664); MPHOSPH6(10200); POLDIP2(26073); SARM1 |
| | (23098); NF1(4763); EIF1(10209); TMEM101(84336); PPM1D(8493); HOXB9(3219); BCL2(596); PRX(57716); ERF |
| | (2077); GRLF1(2909); BTBD4(140685); PARD6B(84612); MAPK1(5594); CACNA1I(8911); TNRC6B(23112); SEPT3(55964); |
| | SSX4B(548313); PCYT1B(9468); SRPX(8406); OATL1(4943); SMC1L1(8243); SPRY3(10251); |
| 33 | ADCY1(107) |
| 34 | CNNM4(26504) |
| 35 | FUT3(2525) |
| 36 | RER1(11079); SASS6(163786); CDC14A(8556); RAP1A(5906); MCL1(4170); CKS1B(1163); F11R(50848); BRP44(25874); |
| | DNM3(26052); RGS2(5997); MFSD4(148808); PFKFB2(5208); PROX1(5629); CCNL2(81669); MSH2(4436); SERTAD2 |
| | (9792); EDAR(10913); ZC3H6(376940); WDR33(55339); MCM6(4175); CYBRD1(79901); PTD004(29789); STAT1 |
| | (6772); CASP10(843); CUL3(8452); HDAC4(9759); FLJ45964(401040); SRGAP3(9901); TMEM16K(55129); TDGF1( |

TABLE 2-6

| | 6997); APPL(26060); AER61(285203); PROK2(60675); CLDND1(56650); ACPP(55); CLSTN2(64084); XRN1(54464); SMC4L1 |
|---|---|
| | (10051); KLHL6(89857); YEATS2(55689); SENP2(59343); TP73L(8626); MGC21675(92070); HD(3064); DKFZp761B107 |
| | (91050); IL8(3576); FRAS1(80144); PRKG2(5593); DNAJB14(79962); TIFA(92610); MAD2L1(4085); FGF2 |
| | (2247); LOC134145(134145); PRLR(5618); LIFR(3977); PLCXD3(345557); MRPS30(10884); LOC153364(153364); APC |
| | (324); MCC(4163); SLC12A2(6558); FGF1(2246); G3BP(10146); GCNT2(2651); TCF19(6941); TNFRSF21(27242); ICK |
| | (22858); COL19A1(1310); CNR1(1268); HACE1(57531); BVES(11149); ATG5(9474); SESN1(27244); SERINC1(57515); |
| | HEY2(23493); TNFAIP3(7128); LOC90639(90639); TRIAD3(54476); LOC90693(90693); CYCS(54205); CREB5 |
| | (9586); CDK6(1021); NAPE-PLD(222236); RELN(5649); ZC3HAV1(56829); CNOT7(29883); MTMR7(9108); ADRA1A |
| | (148); UNC5D(137970); SPFH2(11160); BRF2(55290); UBE2V2(7336); UBE2W(55284); LRRCC1(85444); E2F5(1875); |
| | MTSS1(9788); GNAQ(2776); C9orf47(286223); CDC14B(8555); NR4A3(8013); C1QL3(389941); PARD3(56288); ZNF365 |
| | (22891); SGPL1(8879); COX15(1355); NOLC1(9221); GPR26(2849); EIF4G2(1982); DLG2(1740); CUL5(8065); PPP2R1B |
| | (5519); ARHGEF12(23365); BCL2L14(79370); ATF7IP(55729); CPNE8(144402); TMEM16F(196527); SP1(6667); |
| | EEA1(8411); APAF1(317); HCFC2(29915); FBXO21(23014); 15E1.2(283459); P2RX7(5027); TMEM132B(114795); |
| | ETNK1(55500); DIP13B(55198); LATS2(26524); TNFRSF19(55504); FLT1(2321); HSPH1(10808); FOXO1A(2308); SUGT1 |
| | (10910); RAP2A(5911); FLJ10769(55739); CUL4A(8451); METTL3(56339); KIAA1443(57594); PPM1A(5494); MAP3K9 |
| | (4293); C14orf43(91748); LTBP2(4053); DIO2(1734); ITPK1(3705); EIF5(1983); JAG2(3714); GOLGA8G(283768); |
| | TP53BP1(7158); FGF7(2252); NARG2(79664); FEM1B(10116); IREB2(3658); ABHD2(11057); GSPT1(2935); MKL2 |
| | (57496); GABARAPL2(11345); GAN(8139); CDH13(1012); MNT(4335); TRAF4(9618); BRCA1(672); NPEPPS(9520); |
| | MXRA7(439921); CARD14(79092); RAB12(201475); VAPA(9218); CEP192(55125); C18orf1(753); CTAGE1(64693); |
| | MALT1(10892); PHLPP(23239); CLEC4M(10332); GGTL3(2686); C20orf117(140710); RBL1(5933); UBE2V1(7335); CSTF1 |
| | (1477); CABLES2(81928); SON(6651); SLC5A3(6526); CDC45L(8318); MAPK1(5594); MN1(4330); DEPDC5(9681); |
| | MCM5(4174); TNRC6B(23112); LOC63929(63929); SEPT3(55964); ATXN10(25814); ZBED4(9889); PRKX(5613); |
| | AGTR2(186); SEPT6(23157); ATP1B4(23439); RP6-213H19.1(51765); FMR1(2332); DKC1(1736); AFF2(2334); |
| 37 | ZKSCAN1(7586) |
| 38 | TPPP(11076) |
| 39 | SRGAP3(9901) |
| 40 | DFFA(1676) |
| 41 | LIMD1(8994) |
| 42 | FSTL3(10272) |
| 43 | NUDCD3(23386) |
| 44 | GIPC3(126326) |
| 45 | IQCE(23288) |
| 46 | CMTM4(146223) |
| 47 | LETM1(3954) |
| 48 | GMFB(2764) |
| 49 | NFIX(4784) |
| 50 | PIK3R1(5295) |
| 51 | ATXN1(6310) |
| 52 | RP5-875H10.1(389432) |
| 53 | TPI1(7167) |
| 54 | ZNF192(7745) |
| 55 | ABO(28) |
| 56 | PRX(57716) |
| 57 | PALM2(114299) |
| 58 | NFIX(4784) |

TABLE 2-7

| | |
|---|---|
| 59 | RBMY1A1(5940) |
| 60 | TNFRSF8(943) |
| 61 | CRTC1(23373) |
| 62 | BBS5(129880) |
| 63 | COL27A1(85301) |
| 64 | DGCR14(8220) |
| 65 | EXOSC6(118460) |
| 66 | EIF2C4(192670) |
| 67 | RAB30(27314) |
| 68 | KCNMA1(3778) |
| 69 | CCND2(894) |
| 70 | ADARB2(105) |
| 71 | FYCO1(79443) |
| 72 | ADCY7(113) |
| 73 | IGSF4D(253559) |
| 74 | GNG13(51764) |
| 75 | ENTPD7(57089) |
| 76 | TMEM110(375346) |
| 77 | CREB3L3(84699) |
| 78 | ATXN1(6310) |
| 79 | ADARB2(105) |
| 80 | PRLR(5618) |
| 81 | ADARB2(105) |
| 82 | XAB1(11321) |
| 83 | MGAT4A(11320) |
| 84 | NBPF11(200030) |
| 85 | LIN10(80262) |
| 86 | SPOCK2(9806) |
| 87 | NTN1(9423) |
| 88 | ISG20L2(81875) |
| 89 | GGTL3(2686) |
| 90 | LRPAP1(4043) |
| 91 | GGTL3(2686) |
| 92 | IGF2(3481) |
| 93 | NEURL(9148) |
| 94 | TNRC6B(23112) |
| 95 | FN3K(64122) |
| 96 | BRWD1(54014) |
| 97 | DISC1(27185) |
| 98 | ENAH(55740) |
| 99 | GDF11(10220) |
| 100 | RAB22A(57403) |
| 101 | APOE(348) |
| 102 | PSD3(23362) |
| 103 | PSD3(23362) |
| 104 | NKTR(4820) |

TABLE 2-8

| | |
|---|---|
| 105 | JDP2(122953) |
| 106 | RAB40C(57799) |
| 107 | CNTN2(6900) |
| 108 | PRX(57716) |
| 109 | APOL6(80830) |
| 110 | FOXK1(221937) |
| 111 | YIPF6(286451) |
| 112 | HOXB8(3218) |
| 113 | CLN8(2055) |
| 114 | PRX(57716) |
| 115 | EVC(2121) |
| 116 | VANGL1(81839) |
| 117 | TNRC6B(23112) |
| 118 | JPH4(84502) |
| 119 | PHACTR2(9749) |
| 120 | LRRC27(80313) |
| 121 | TBL1X(6907) |
| 122 | BBS7(55212) |
| 123 | BDKRB2(624) |
| 124 | LPP(4026) |
| 125 | SAMD11(148398) |
| 126 | TNRC6B(23112) |
| 127 | ZGPAT(84619) |
| 128 | TNRC6B(23112) |
| 129 | RASSF5(83593) |
| 130 | USH1G(124590) |
| 131 | HBXAP(51773) |
| 132 | HIF3A(64344) |
| 133 | LRPAP1(4043) |
| 134 | DIAPH2(1730) |
| 135 | RAB8A(4218) |
| 136 | PRDM16(63976) |
| 137 | STX3A(6809) |
| 138 | AK1(203) |
| 139 | ENAH(55740) |
| 140 | PURB(5814) |
| 141 | MON1B(22879) |
| 142 | EVC(2121) |
| 143 | PQLC2(54896) |
| 144 | BRSK2(9024) |
| 145 | ATP11A(23250) |
| 146 | TSPAN14(81619) |
| 147 | CYP4F3(4051) |
| 148 | COPG2(26958) |
| 149 | PTPRT(11122) |
| 150 | ZNF84(7637) |

TABLE 2-10

| | |
|---|---|
| 151 | CACNA1A(773) |
| 152 | GIPC3(126326) |
| 153 | RAB36(9609) |
| 154 | DNM3(26052) |
| 155 | GABRA4(2557) |
| 156 | FOXK1(221937) |
| 157 | LAT(27040) |
| 158 | ABHD2(11057) |
| 159 | ENTPD7(57089) |
| 160 | ATP11A(23250) |
| 161 | CLCA1(1179) |
| 162 | MARCH3(115123) |
| 163 | USH1G(124590) |
| 164 | FOXK1(221937) |
| 165 | PRSS16(10279) |
| 166 | BLR1(643) |
| 167 | ANKRD30B(374860) |
| 168 | DCX(1641) |
| 169 | CACNA1A(773) |
| 170 | KATNAL1(84056) |
| 171 | PRTG(283659) |
| 172 | ADCY7(113) |
| 173 | EIF4EBP2(1979) |
| 174 | HEXDC(284004) |
| 175 | H6PD(9563) |
| 176 | APC2(10297) |
| 177 | SF4(57794) |
| 178 | BBS5(129880) |
| 179 | TBC1D16(125058) |
| 180 | CHD5(26038) |
| 181 | CBX5(23468) |
| 182 | TGOLN2(10618) |
| 183 | ICMT(23463) |
| 184 | SELI(85465) |
| 185 | WASF2(10163) |
| 186 | TMC6(11322) |
| 187 | MUC17(140453) |
| 188 | ADCY1(107) |
| 189 | UNQ6125(442092) |
| 190 | LRRC27(80313) |
| 191 | RAB30(27314) |
| 192 | CBL(867) |
| 193 | GOLGA3(2802) |
| 194 | PTGFR(5737) |
| 195 | CDK6(1021) |
| 196 | PURB(5814) |

TABLE 2-11

| | |
|---|---|
| 197 | PTGFR(5737) |
| 198 | FUT4(2526) |
| 199 | LYNX1(66004) |
| 200 | SNX8(29886) |
| 201 | CDK6(1021) |
| 202 | PRKAA2(5563) |
| 203 | ADCY1(107) |
| 204 | IPO9(55705) |
| 205 | TBL3(10607) |
| 206 | MLLT6(4302) |
| 207 | ANKRD30B(374860) |
| 208 | MAP6(4135) |
| 209 | CLN8(2055) |
| 210 | GRM4(2914) |
| 211 | NTRK2(4915) |
| 212 | REXO1L1(254958) |
| 213 | EPB41L5(57669) |
| 214 | TMED4(222068) |
| 215 | ERBB4(2066) |
| 216 | RIPK5(25778) |
| 217 | APOE(348) |
| 218 | BOK(666) |
| 219 | BAG5(9529) |
| 220 | TRAF7(84231) |
| 221 | LRRC27(80313) |
| 222 | HOXB8(3218) |
| 223 | PRKAA2(5563) |
| 224 | RAB40C(57799) |
| 225 | AFF4(27125) |
| 226 | GIPC3(126326) |
| 227 | H-plk(51351) |
| 228 | PIK3CA(5290) |
| 229 | LRRC14(9684) |
| 230 | NAV1(89796) |
| 231 | PRTG(283659) |
| 232 | SPRY3(10251) |
| 233 | PDE4D(5144) |
| 234 | ZNF440L(284390) |
| 235 | PSD3(23362) |
| 236 | GABRA4(2557) |
| 237 | ADCY1(107) |
| 238 | F7(2155) |
| 239 | KLF7(8609) |
| 240 | RP6-166C19.1(255313) |
| 241 | NFAT5(10725) |
| 242 | PRTG(283659) |

TABLE 2-12

| | |
|---|---|
| 243 | SAMD11(148398) |
| 244 | ZGPAT(84619) |
| 245 | RAB40C(57799) |
| 246 | GRIN2A(2903) |
| 247 | LIMD1(8994) |
| 248 | TNRC6B(23112) |
| 249 | GIPC3(126326) |
| 250 | GABRA4(2557) |
| 251 | TNRC6B(23112) |
| 252 | TMED4(222068) |
| 253 | MXRA7(439921) |
| 254 | AFG3L1(172) |
| 255 | TTYH3(80727) |
| 256 | DCP2(167227) |
| 257 | QKI(9444) |
| 258 | NFIX(4784) |
| 259 | ENAH(55740) |
| 260 | WDR37(22884) |
| 261 | NUDT3(11165) |
| 262 | KBTBD8(84541) |
| 263 | CD59(966) |
| 264 | UNQ6125(442092) |
| 265 | SH3PXD2A(9644) |
| 266 | FOXK1(221937) |
| 267 | CREB3L2(64764) |
| 268 | HOXB8(3218) |
| 269 | YPEL1(29799) |
| 270 | PRX(57716) |
| 271 | CXorf15(55787) |
| 272 | FOXK1(221937) |
| 273 | GIPC3(126326) |
| 274 | SCLY(51540) |
| 275 | RP11-114H20.1(401589) |
| 276 | SMU1(55234) |
| 277 | CALML4(91860) |
| 278 | SNX8(29886) |
| 279 | TP73L(8626) |
| 280 | ENTPD7(57089) |
| 281 | AFG3L1(172) |
| 282 | RAPH1(65059) |
| 283 | SLC36A1(206358) |
| 284 | RBJ(51277) |
| 285 | MUCDHL(53841) |
| 286 | KRTHB5(3891) |
| 287 | SEMA3E(9723) |
| 288 | WDR35(57539) |

TABLE 2-13

| | |
|---|---|
| 289 | SIPA1L3(23094) |
| 290 | GGTL3(2686) |
| 291 | PCYT2(5833) |
| 292 | ENAH(55740) |
| 293 | ANK1(286) |
| 294 | GRIA1(2890) |
| 295 | GIPC3(126326) |
| 296 | VAPB(9217) |
| 297 | PDPR(55066) |
| 298 | BRCC3(79184) |
| 299 | LETM1(3954) |
| 300 | SARM1(23098) |
| 301 | DCP2(167227) |
| 302 | TAGLN(6876) |
| 303 | TPPP(11076) |
| 304 | SEC14L1(6397) |
| 305 | H-plk(51351) |
| 306 | GIPC3(126326) |
| 307 | HS6ST1(9394) |
| 308 | EVC(2121) |
| 309 | SLC6A3(6531) |
| 310 | SCRT1(83482) |
| 311 | RP11-114H20.1(401589) |
| 312 | JPH4(84502) |
| 313 | CREB3L3(84699) |
| 314 | BOK(666) |
| 315 | ZFPL(162967) |
| 316 | POU3F1(5453) |
| 317 | GM632(57473) |
| 318 | ZNF213(7760) |
| 319 | PHF15(23338) |
| 320 | PRX(57716) |
| 321 | TRAF6(7189) |
| 322 | ANKRD36(375248) |
| 323 | NFATC1(4772) |
| 324 | FBXO40(51725) |
| 325 | ZGPAT(84619) |
| 326 | PDXK(8566) |
| 327 | SFRS8(6433) |
| 328 | CACNA1I(8911) |
| 329 | AGPAT4(56895) |
| 330 | EVC(2121) |
| 331 | JARID1A(5927) |
| 332 | ZNF641(121274) |
| 333 | PGAP1(80055) |
| 334 | DSC2(1824) |

TABLE 2-14

| | |
|---|---|
| 335 | ABHD2(11057) |
| 336 | BDKRB2(624) |
| 337 | BCAM(4059) |
| 338 | SCYL1(57410) |
| 339 | MARCH1(55016) |
| 340 | USP31(57478) |
| 341 | GDF6(392255) |
| 342 | BCL2(596) |
| 343 | DKFZP434B0335(25851) |
| 344 | PLCXD3(345557) |
| 345 | IGF2(3481) |
| 346 | MTHFR(4524) |
| 347 | WDR33(55339) |
| 348 | KCNA7(3743) |
| 349 | ADCY1(107) |
| 350 | CHD5(26038) |
| 351 | AFF2(2334) |
| 352 | SPN(6693) |
| 353 | JARID1A(5927) |
| 354 | HIF3A(64344) |
| 355 | TMC6(11322) |
| 356 | ENTPD7(57089) |
| 357 | LTB4R2(56413) |
| 358 | ADARB2(105) |
| 359 | TRO(7216) |
| 360 | ASB1(51665) |
| 361 | MAPK1(5594) |
| 362 | NFAT5(10725) |
| 363 | EEA1(8411) |
| 364 | ZNF705CP(389631) |
| 365 | CREB5(9586) |
| 366 | EXOSC6(118460) |
| 367 | FMNL3(91010) |
| 368 | LETM1(3954) |
| 369 | GGTL3(2686) |
| 370 | CDK6(1021) |
| 371 | SBK1(388228) |
| 372 | EIF4EBP2(1979) |
| 373 | OPCML(4978) |
| 374 | MECP2(4204) |
| 375 | TNFRSF13B(23495) |
| 376 | TNRC6B(23112) |
| 377 | STX7(8417) |
| 378 | CREB1(1385) |
| 379 | CBX5(23468) |
| 380 | NFIX(4784) |

TABLE 2-15

| | |
|---|---|
| 381 | ADARB2(105) |
| 382 | TNS1(7145) |
| 383 | SELI(85465) |
| 384 | LETM1(3954) |
| 385 | FGFRL1(53834) |
| 386 | ZNF440L(284390) |
| 387 | GABRG1(2565) |
| 388 | DECR2(26063) |
| 389 | HTRA2(27429) |
| 390 | LPAL2(80350) |
| 391 | OPCML(4978) |
| 392 | USP37(57695) |
| 393 | ITR(160897) |
| 394 | SFRS8(6433) |
| 395 | APOE(348) |
| 396 | FGD3(89846) |
| 397 | LRRC27(80313) |
| 398 | H6PD(9563) |
| 399 | ADAM22(53616) |
| 400 | LRRC27(80313) |
| 401 | CREB3L3(84699) |
| 402 | OXCT2(64064) |
| 403 | DISC1(27185) |
| 404 | NEURL(9148) |
| 405 | WDR55(54853) |
| 406 | FAM8A1(51439) |
| 407 | GABRB2(2561) |
| 408 | NELF(26012) |
| 409 | H6PD(9563) |
| 410 | TNFRSF13B(23495) |
| 411 | WNT7B(7477) |
| 412 | ADARB2(105) |
| 413 | CXorf6(10046) |
| 414 | TPPP(11076) |
| 415 | DGCR14(8220) |
| 416 | PKN3(29941) |
| 417 | LRPAP1(4043) |
| 418 | CER1(9350) |
| 419 | VGLL3(389136) |
| 420 | PCDHGB4(8641) |
| 421 | RAB40C(57799) |
| 422 | YOD1(55432) |
| 423 | CREB1(1385) |
| 424 | SLC7A1(6541) |
| 425 | CHTF18(63922) |
| 426 | CALN1(83698) |

TABLE 2-16

| | |
|---|---|
| 427 | BSDC1(55108) |
| 428 | NUAK1(9891) |
| 429 | GIPC3(126326) |
| 430 | RASGEF1B(153020) |
| 431 | MAGI1(9223) |
| 432 | BSDC1(55108) |
| 433 | VGLL3(389136) |
| 434 | NF2(4771) |
| 435 | PDXK(8566) |
| 436 | GABRG1(2565) |
| 437 | LIMD1(8994) |
| 438 | L3MBTL2(83746) |
| 439 | TPPP(11076) |
| 440 | PRKAA2(5563) |
| 441 | BRWD1(54014) |
| 442 | SELI(85465) |
| 443 | LRRC27(80313) |
| 444 | CALN1(83698) |
| 445 | GATAD2A(54815) |
| 446 | SH3BP2(6452) |
| 447 | CDR1(1038) |
| 448 | POU3F3(5455) |
| 449 | TMEM56(148534) |
| 450 | CDR1(1038) |
| 451 | ASB1(51665) |
| 452 | GPIAP1(4076) |
| 453 | VAV2(7410) |
| 454 | JARID1A(5927) |
| 455 | TRIM14(9830) |
| 456 | TPPP(11076) |
| 457 | BDKRB2(624) |
| 458 | E2F2(1870) |
| 459 | APBB3(10307) |
| 460 | LRPAP1(4043) |
| 461 | RGPD2(440872) |
| 462 | PALM2(114299) |
| 463 | APPL(26060) |
| 464 | TPPP(11076) |
| 465 | GGTL3(2686) |
| 466 | RAB40C(57799) |
| 467 | PRMT8(56341) |
| 468 | POFUT2(23275) |
| 469 | STK38L(23012) |
| 470 | BOK(666) |
| 471 | CRTC1(23373) |
| 472 | FAM20B(9917) |

TABLE 2-17

| | |
|---|---|
| 473 | ICMT(23463) |
| 474 | BAK1(578) |
| 475 | SLC36A4(120103) |
| 476 | SEPT5(5413) |
| 477 | EVC(2121) |
| 478 | PRTG(283659) |
| 479 | TRIM33(51592) |
| 480 | ZFP41(286128) |
| 481 | PDXK(8566) |
| 482 | TEAD1(7003) |
| 483 | ENAH(55740) |
| 484 | PLXDC1(57125) |
| 485 | PRX(57716) |
| 486 | AGPAT3(56894) |
| 487 | RAB40C(57799) |
| 488 | LRPAP1(4043) |
| 489 | PRELP(5549) |
| 490 | ZNF44(51710) |
| 491 | GNG13(51764) |
| 492 | PRKAA2(5563) |
| 493 | PRTG(283659) |
| 494 | GABRA4(2557) |
| 495 | CRTAP(10491) |
| 496 | PSD3(23362) |
| 497 | BCAT1(586) |
| 498 | RP11-308D16.4(441522) |
| 499 | LRPAP1(4043) |
| 500 | PFKFB2(5208) |
| 501 | PPM1F(9647) |
| 502 | GPR123(84435) |
| 503 | FMNL3(91010) |
| 504 | PRTG(283659) |
| 505 | GRIN2A(2903) |
| 506 | POU3F3(5455) |
| 507 | SNX27(81609) |
| 508 | BOK(666) |
| 509 | RAB8A(4218) |
| 510 | TNRC6B(23112) |
| 511 | ERBB4(2066) |
| 512 | GABRA4(2557) |
| 513 | ASB1(51665) |
| 514 | MECP2(4204) |
| 515 | ZNF264(9422) |
| 516 | ASB1(51665) |
| 517 | RBMS2(5939) |
| 518 | GRIN2A(2903) |

TABLE 2-18

| | |
|---|---|
| 519 | SOX11(6664) |
| 520 | KLF12(11278) |
| 521 | CBL(867) |
| 522 | PGAP1(80055) |
| 523 | DDEF2(8853) |
| 524 | MINA(84864) |
| 525 | TNRC6B(23112) |
| 526 | LRPAP1(4043) |
| 527 | AXL(558) |
| 528 | ZNF289(84364) |
| 529 | NEURL(9148) |
| 530 | FZD4(8322) |
| 531 | PRLR(5618) |
| 532 | PB1(55193) |
| 533 | ARF3(377) |
| 534 | JARID1A(5927) |
| 535 | POLR2J2(246721) |
| 536 | SYNCRIP(10492) |
| 537 | PAG1(55824) |
| 538 | EXOC5(10640) |
| 539 | DENR(8562) |
| 540 | RAB40C(57799) |
| 541 | RNF165(494470) |
| 542 | SLC38A5(92745) |
| 543 | FOXK1(221937) |
| 544 | SOCS7(30837) |
| 545 | RNF40(9810) |
| 546 | LRPAO1(4043) |
| 547 | STX7(8417) |
| 548 | EVC(2121) |
| 549 | ERGIC1(57222) |
| 550 | LPAL2(80350) |
| 551 | DDR2(4921) |
| 552 | ENAH(55740) |
| 553 | ENAH(55740) |
| 554 | FN3K(64122) |
| 555 | ZNF214(7760) |
| 556 | LIMD1(8994) |
| 557 | SNPH(9751) |
| 558 | PRX(57716) |
| 559 | SAMD11(148398) |
| 560 | FREQ(23413) |
| 561 | HNRPU(3192) |
| 562 | TMC6(11322) |
| 563 | RAB40C(57799) |
| 564 | WDR37(22884) |

TABLE 2-19

| | |
|---|---|
| 565 | EGFR(1956) |
| 566 | FAM9C(171484) |
| 567 | TMED4(222068) |
| 568 | FAM102B(284611) |
| 569 | GNG4(2786) |
| 570 | RP6-166C19.1(255313) |
| 571 | KSR1(8844) |
| 572 | DZIP1(22873) |
| 573 | TPPP(11076) |
| 574 | RP6-166C19.1(255313) |
| 575 | ISG20L2(81875) |
| 576 | BMPR2(659) |
| 577 | ATP9A(10079) |
| 578 | GAS7(8522) |
| 579 | ENAH(55740) |
| 580 | BTRC(8945) |
| 581 | SUPT3H(8464) |
| 582 | RPS15A(6210) |
| 583 | GATAD1(57798) |
| 584 | FOXK1(221937) |
| 585 | AP3S2(10239) |
| 586 | HEMK1(51409) |
| 587 | ARNT2(9915) |
| 588 | H6PD(9563) |
| 589 | APOE(348) |
| 590 | PRX(57716) |
| 591 | LETM1(3954) |
| 592 | CRAMP1L(57585) |
| 593 | LTB4R2(56413) |
| 594 | RASSF2(9770) |
| 595 | TPPP(11076) |
| 596 | ARGFX(503582) |
| 597 | SRGAP3(9901) |
| 598 | DUSP8(1850) |
| 599 | PRX(57716) |
| 600 | SEPT5(5413) |
| 601 | RBMS3(27303) |
| 602 | MECP2(4204) |
| 603 | SORD(6652) |
| 604 | ARFGAP1(55738) |
| 605 | GIPC3(126326) |
| 606 | MGAT2(4247) |
| 607 | ITPK1(3705) |
| 608 | SPFH2(11160) |
| 609 | TNRC6B(23112) |
| 610 | CREB1(1385) |

TABLE 2-20

| | |
|---|---|
| 611 | HOXB8(3218) |
| 612 | GGTL3(2686) |
| 613 | RBMS3(27303) |
| 614 | PSD3(23362) |
| 615 | BACH2(60468) |
| 616 | PIP5K1C(23396) |
| 617 | MTHFR(4524) |
| 618 | RBM14(10432) |
| 619 | LRRC27(80313) |
| 620 | APC2(10297) |
| 621 | LRRC14(9684) |
| 622 | PTGFR(5737) |
| 623 | TBC1D16(125058) |
| 624 | Ells1(222166) |
| 625 | ILF3(3609) |
| 626 | TNRC6B(23112) |
| 627 | RBM3(5935) |
| 628 | HCN2(610) |
| 629 | NT5DC2(64943) |
| 630 | MAPK1(5594) |
| 631 | PRX(57716) |
| 632 | AK2(204) |
| 633 | MTHFR(4524) |
| 634 | SEC24C(9632) |
| 635 | ING5(84289) |
| 636 | SCN5A(6331) |
| 637 | PTGDS(5730) |
| 638 | ZXDC(79364) |
| 639 | HIP1(3092) |
| 640 | FGFRL1(53834) |
| 641 | BIRC4(331) |
| 642 | FAIM2(23017) |
| 643 | CREB3L2(64764) |
| 644 | PAX2(5076) |
| 645 | GLS2(27165) |
| 646 | PCYT2(5833) |
| 647 | SRGAP3(9901) |
| 648 | GIPC3(126326) |
| 649 | PRRT2(112476) |
| 650 | SCRT1(83482) |
| 651 | GIPC3(126326) |
| 652 | SCRT1(83482) |
| 653 | ZYG11B(79699) |
| 654 | DRCTNNB1A(84668) |
| 655 | GGTL3(2686) |
| 656 | TPPP(11076) |

TABLE 2-21

| | |
|---|---|
| 657 | FSTL4(23105) |
| 658 | EVC(2121) |
| 659 | BRCA1(672) |
| 660 | AXL(558) |
| 661 | H-plk(51351) |
| 662 | TMEM10(93377) |
| 663 | DISC1(27185) |
| 664 | RPE(6120) |
| 665 | EVC(2121) |
| 666 | TPPP(11076) |
| 667 | FDPS(2224) |
| 668 | ZNF721(170960) |
| 669 | WNK3(65267) |
| 670 | SLC6A3(6531) |
| 671 | RBMS3(27303) |
| 672 | TRIM14(9830) |
| 673 | CBX5(23468) |
| 674 | ZNF493(284443) |
| 675 | GABRA4(2557) |
| 676 | CACNB4(785) |
| 677 | GPR123(84435) |
| 678 | TMEM132B(114795) |
| 679 | PMS2L2(5380) |
| 680 | KLF13(51621) |
| 681 | DAPK3(1613) |
| 682 | STK17A(9263) |
| 683 | SNX8(29886) |
| 684 | KCNMA1(3778) |
| 685 | GIPC3(126326) |
| 686 | AFG3L1(172) |
| 687 | TUSC5(286753) |
| 688 | TPPP(11076) |
| 689 | FN3K(64122) |
| 690 | WARS2(10352) |
| 691 | CSNK1G1(53944) |
| 692 | SH3BP2(6452) |
| 693 | FMNL3(91010) |
| 694 | GM632(57473) |
| 695 | PALM2(114299) |
| 696 | ZFP41(286128) |
| 697 | FOXK1(221937) |
| 698 | PRKAA2(5563) |
| 699 | LRRC27(80313) |
| 700 | ZF(58487) |
| 701 | BRCA1(672) |
| 702 | MGAT4A(11320) |

TABLE 2-22

| | |
|---|---|
| 703 | TRIM33(51592) |
| 704 | LTBP3(4054) |
| 705 | CUGBP2(10659) |
| 706 | ZNF440L(284390) |
| 707 | ISG20L1(64782) |
| 708 | BDKRB2(624) |
| 709 | ALPK3(57538) |
| 710 | TFRC(7037) |
| 711 | PCYT2(5833) |
| 712 | YEATS2(55689) |
| 713 | FDPS(2224) |
| 714 | BOK(666) |
| 715 | BBS5(129880) |
| 716 | ZBTB7A(51341) |
| 717 | TUBB1(81027) |
| 718 | DIDO1(11083) |
| 719 | SEC24C(9632) |
| 720 | GNG13(51764) |
| 721 | SAMD11(148398) |
| 722 | P2RXL1(9127) |
| 723 | SNN(8303) |
| 724 | GRM4(2914) |
| 725 | HD(3064) |
| 726 | BRCA1(672) |
| 727 | PCYT2(5833) |
| 728 | FAM26C(255022) |
| 729 | BOK(666) |
| 730 | MMP24(10893) |
| 731 | ADARB2(105) |
| 732 | TTYH3(80727) |
| 733 | SYT2(127833) |
| 734 | TTBK1(84630) |
| 735 | STK16(8576) |
| 736 | LRPAP1(4043) |
| 737 | TNFRSF13B(23495) |
| 738 | SNX8(29886) |
| 739 | SPN(6693) |
| 740 | PAG1(55824) |
| 741 | CNTN2(6900) |
| 742 | BRCA1(672) |
| 743 | SOX1(6656) |
| 744 | EML3(256364) |
| 745 | TENC1(23371) |
| 746 | GIPC3(126326) |
| 747 | CYCS(54205) |
| 748 | ZFP41(286128) |

TABLE 2-23

| | |
|---|---|
| 749 | JMJD2B(23030) |
| 750 | ZDHHC11(79844) |
| 751 | SNX8(29886) |
| 752 | ZNF721(170960) |
| 753 | LETM1(3954) |
| 754 | LETM1(3954) |
| 755 | NUFIP2(57532) |
| 756 | CBX5(23468) |
| 757 | CDK6(1021) |
| 758 | LRRC27(80313) |
| 759 | TCF2(6928) |
| 760 | ZNF24(7572) |
| 761 | SNX27(81609) |
| 762 | ZNF468(90333) |
| 763 | HIST2H4(8370) |
| 764 | VKORC1L1(154807) |
| 765 | ABHD2(11057) |
| 766 | ZNF226(7769) |
| 767 | TSPAN18(90139) |
| 768 | MCFD2(90411) |
| 769 | FDPS(2224) |
| 770 | TNRC6B(23112) |
| 771 | FGD3(89846) |
| 772 | BOK(666) |
| 773 | STAC2(342667) |
| 774 | RAB40C(57799) |
| 775 | SAPS3(55291) |
| 776 | BCAM(4059) |
| 777 | LEPR(3953) |
| 778 | RNF12(51132) |
| 779 | MECP2(4204) |
| 780 | MAPK1(5594) |
| 781 | MAP2K1IP1(8649) |
| 782 | FAM105B(90268) |
| 783 | TMC6(11322) |
| 784 | CBX5(23468) |
| 785 | LETM1(3954) |
| 786 | N4BP3(23138) |
| 787 | POU2AF1(5450) |
| 788 | NISCH(11188) |
| 789 | GPR123(84435) |
| 790 | EVC(2121) |
| 791 | ENAH(55740) |
| 792 | TMC6(11322) |
| 793 | BBS7(55212) |
| 794 | RAB40C(57799) |

TABLE 2-24

| | |
|---|---|
| 795 | SLC5A3(6526) |
| 796 | RNF31(55072) |
| 797 | LIFR(3977) |
| 798 | DIP(23151) |
| 799 | LEPR(3953) |
| 800 | DCP2(167227) |
| 801 | HIF3A(64344) |
| 802 | RFP2(10206) |
| 803 | JM11(90060) |
| 804 | BOK(666) |
| 805 | PRX(57716) |
| 806 | TPPP(11076) |
| 807 | PRX(57716) |
| 808 | JARID1A(5927) |
| 809 | PAPD1(55149) |
| 810 | FGFRL1(53834) |
| 811 | VAPB(9217) |
| 812 | RBM33(155435) |
| 813 | TBL3(10607) |
| 814 | GABRA4(2557) |
| 815 | ZNF721(170960) |
| 816 | PRDM10(56980) |
| 817 | APOE(348) |
| 818 | NEURL(9148) |
| 819 | KPNA1(3836) |
| 820 | LIFR(3977) |
| 821 | RAB40C(57799) |
| 822 | GRIN2A(2903) |
| 823 | FGF2(2247) |
| 824 | DIO2(1734) |
| 825 | SLC30A7(148867) |
| 826 | SNX27(81609) |
| 827 | EVI5(7813) |
| 828 | LRRC27(80313) |
| 829 | PPCDC(60490) |
| 830 | ITGAM(3684) |
| 831 | RNF12(51132) |
| 832 | TSPAN18(90139) |
| 833 | LRRC14(9684) |
| 834 | ADCY1(107) |
| 835 | PAG1(55824) |
| 836 | SOX11(6664) |
| 837 | AFF2(2334) |
| 838 | FSTL3(10272) |
| 839 | DISC1(27185) |
| 840 | ZDHHC2(51201) |

TABLE 2-25

| | |
|---|---|
| 841 | FSTL3(10272) |
| 842 | PAG1(55824) |
| 843 | MXRA7(439921) |
| 844 | SBK1(388228) |
| 845 | APOL6(80830) |
| 846 | GAB2(9846) |
| 847 | GLS2(27165) |
| 848 | SLC7A11(23657) |
| 849 | AFF2(2334) |
| 850 | MOBKL2B(79817) |
| 851 | PSD3(23362) |
| 852 | CHML(1122) |
| 853 | TNRC6B(23112) |
| 854 | NAPE-PLD(222236) |
| 855 | SOX5(6660) |
| 856 | APOL6(80830) |
| 857 | PDXK(8566) |
| 858 | FDPS(2224) |
| 859 | CBX5(23468) |
| 860 | CBX5(23468) |
| 861 | EIF4E3(317649) |
| 862 | SNX8(29886) |
| 863 | NKTR(4820) |
| 864 | SH3BP2(6452) |
| 865 | RAB40C(57799) |
| 866 | BAIAP2(10458) |
| 867 | RAB40C(57799) |
| 868 | CALML4(91860) |
| 869 | BRWD1(54014) |
| 870 | POU3F3(5455) |
| 871 | RBBP4(5928) |
| 872 | STK35(140901) |
| 873 | FMNL3(91010) |
| 874 | SNX1(6642) |
| 875 | SNX8(29886) |
| 876 | SGCD(6444) |
| 877 | TRIM14(9830) |
| 878 | FBXO28(23219) |
| 879 | QKI(9444) |
| 880 | PRR11(55771) |
| 881 | XPO4(64328) |
| 882 | LIMD1(8994) |
| 883 | PNMA5(114824) |
| 884 | MECP2(4204) |
| 885 | TNRC6B(23112) |
| 886 | SLC5A3(6526) |

TABLE 2-26

| | |
|---|---|
| 887 | GABRA4(2557) |
| 888 | SLC1A2(6506) |
| 889 | IHPK1(9807) |
| 890 | CD93(22918) |
| 891 | PGAP1(80055) |
| 892 | DCP2(167227) |
| 893 | SELI(85465) |
| 894 | GGTL3(2686) |
| 895 | CBX5(23468) |
| 896 | LIMD1(8994) |
| 897 | PARP11(57097) |
| 898 | TNRC6B(23112) |
| 899 | H6PD(9563) |
| 900 | BRWD1(54014) |
| 901 | SLC7A11(23657) |
| 902 | TMEM110(375346) |
| 903 | PRX(57716) |
| 904 | TBC1D16(125058) |
| 905 | POU3F3(5455) |
| 906 | SPN(6693) |
| 907 | NKTR(4820) |
| 908 | GABRA4(2557) |
| 909 | PNPO(55163) |
| 910 | TFB1M(51106) |
| 911 | WNK3(65267) |
| 912 | FOXK1(221937) |
| 913 | PLCXD3(345557) |
| 914 | PODXL(5420) |
| 915 | CBX5(23468) |
| 916 | CDK6(1021) |
| 917 | FSTL3(10272) |
| 918 | NEURL(9148) |
| 919 | LRPAP1(4043) |
| 920 | LETM1(3954) |
| 921 | NKTR(4820) |
| 922 | VANGL1(81839) |
| 923 | TNRC6B(23112) |
| 924 | H6PD(9563) |
| 925 | LRPAP1(4043) |
| 926 | ANKRD36(375248) |
| 927 | SEC22L3(9117) |
| 928 | RGPD5(84220) |
| 929 | CBX5(23468) |
| 930 | PACS1(55690) |
| 931 | MECP2(4204) |
| 932 | SLC1A2(6506) |

TABLE 2-27

| | |
|---|---|
| 933 | BDKRB2(624) |
| 934 | RAB40C(57799) |
| 935 | CBX5(23468) |
| 936 | SYNCRIP(10492) |
| 937 | GIPC3(126326) |
| 938 | TNRC6B(23112) |
| 939 | GOLGA3(2802) |
| 940 | LRRC27(80313) |
| 941 | HRB(3267) |
| 942 | WHSC1(7468) |
| 943 | RPE(6120) |
| 944 | RBL1(5933) |
| 945 | ST6GAL2(84620) |
| 946 | AFF3(3899) |
| 947 | BMPR2(659) |
| 948 | KPNA1(3836) |
| 949 | G3BP(10146) |
| 950 | G3BP(10146) |
| 951 | LRRC27(80313) |
| 952 | RP6-166C19.1(255313) |
| 953 | ZNF213(7760) |
| 954 | MBD3(53615) |
| 955 | NUDT3(11165) |
| 956 | TMC6(11322) |
| 957 | LRPAP1(4043) |
| 958 | ZNF721(170960) |
| 959 | RP6-166C19.1(255313) |
| 960 | DCP2(167227) |
| 961 | SARM1(23098) |
| 962 | ZNF510(22869) |
| 963 | CACNA2D2(9254) |
| 964 | JARID1A(5927) |
| 965 | CER1(9350) |
| 966 | SH3GLB2(56904) |
| 967 | ILF3(3609) |
| 968 | SYNGAP1(8831) |
| 969 | PEX19(5824) |
| 970 | LUZP1(7798) |
| 971 | LRRC27(80313) |
| 972 | GRHL2(79977) |
| 973 | FAM53A(152877) |
| 974 | HOXB8(3218) |
| 975 | GRIN2A(2903) |
| 976 | KIF13B(23303) |
| 977 | RAI1(10743) |
| 978 | ADCY1(107) |

TABLE 2-28

| | |
|---|---|
| 979 | FGD3(89846) |
| 980 | BCR(613) |
| 981 | RIMS3(9783) |
| 982 | FAM53A(152877) |
| 983 | TMED4(222068) |
| 984 | SLA(6503) |
| 985 | TMTC1(83857) |
| 986 | ARL5B(221079) |
| 987 | PERQ1(64599) |
| 988 | FADS1(3992) |
| 989 | TRAM2(9697) |
| 990 | NRCAM(4897) |
| 991 | BIRC4BP(54739) |
| 992 | IQCE(23288) |
| 993 | SYNJ2BP(55333) |
| 994 | HIF3A(64344) |
| 995 | RBMS2(5939) |
| 996 | ABC1(63897) |
| 997 | ANGEL2(90806) |
| 998 | PHOX2B(8929) |
| 999 | SLC6A3(6531) |
| 1000 | ZNF490(57474) |
| 1001 | ASB1(51665) |
| 1002 | NAV1(89796) |
| 1003 | KLK4(9622) |
| 1004 | NRXN3(9369) |
| 1005 | CIITA(4261) |
| 1006 | DLGAP2(9228) |
| 1007 | LRRC27(80313) |
| 1008 | LRRC27(80313) |
| 1009 | PURA(5813) |
| 1010 | ILF3(3609) |
| 1011 | ADAM22(53616) |
| 1012 | KATNAL1(84056) |
| 1013 | GOSR1(9527) |
| 1014 | DLEC1(9940) |
| 1015 | GALNTL2(117248) |
| 1016 | CER1(9350) |
| 1017 | SBF1(6305) |
| 1018 | RNF165(494470) |
| 1019 | FOXK1(221937) |
| 1020 | LRRC27(80313) |
| 1021 | TBC1D16(125058) |
| 1022 | FBXO42(54455) |
| 1023 | SYT8(90019) |
| 1024 | CALD1(800) |

TABLE 2-29

| | |
|---|---|
| 1025 | TMEM63A(9725) |
| 1026 | MAPK1(5594) |
| 1027 | PPP1R12B(4660) |
| 1028 | LETM1(3954) |
| 1029 | PARVA(55742) |
| 1030 | ELAVL1(1994) |
| 1031 | PSCD3(9265) |
| 1032 | WHSC1(7468) |
| 1033 | TCL1A(8115) |
| 1034 | SEPT5(5413) |
| 1035 | APBB3(10307) |
| 1036 | ADM2(79924) |
| 1037 | TMEM132B(114795) |
| 1038 | ATXN1(6310) |
| 1039 | LRPAP1(4043) |
| 1040 | PALM2(114299) |
| 1041 | TBC1D16(125058) |
| 1042 | LAMP1(3916) |
| 1043 | GRIN1(2902) |
| 1044 | PLXNA1(5361) |
| 1045 | VGLL3(389136) |
| 1046 | TRAF3(7187) |
| 1047 | ZFP41(286128) |
| 1048 | CREB3L3(84699) |
| 1049 | ERBB4(2066) |
| 1050 | NAV2(89797) |
| 1051 | PDLIM7(9260) |
| 1052 | IL17RB(55540) |
| 1053 | GTDC1(79712) |
| 1054 | DNAJC18(202052) |
| 1055 | ZNF468(90333) |
| 1056 | ZDHHC11(79844) |
| 1057 | BOLA2(552900) |
| 1058 | BRWD1(54014) |
| 1059 | LRRC15(131578) |
| 1060 | ENAH(55740) |
| 1061 | STK35(140901) |
| 1062 | SUPT7L(9913) |
| 1063 | PTDSS2(81490) |
| 1064 | THSD4(79875) |
| 1065 | IGF1(3479) |
| 1066 | PAX8(7849) |
| 1067 | ENAH(55740) |
| 1068 | ZNF621(285268) |
| 1069 | AFG3L1(172) |
| 1070 | EPB41L4B(54566) |

TABLE 2-30

| | |
|---|---|
| 1071 | PBX1(5087) |
| 1072 | ZNF721(170960) |
| 1073 | LRRC27(80313) |
| 1074 | ABCC3(8714) |
| 1075 | OXCT2(64064) |
| 1076 | CPLX1(10815) |
| 1077 | UBE3B(89910) |
| 1078 | ING5(84289) |
| 1079 | LRPAP1(4043) |
| 1080 | HIF3A(64344) |
| 1081 | PTGDS(5730) |
| 1082 | BOK(666) |
| 1083 | DMWD(1762) |
| 1084 | NFIX(4784) |
| 1085 | ZFP41(286128) |
| 1086 | SNX8(29886) |
| 1087 | AFG3L1(172) |
| 1088 | GIPC3(126326) |
| 1089 | SLC36A4(120103) |
| 1090 | MBNL2(10150) |
| 1091 | WDR37(22884) |
| 1092 | RAPH1(65059) |
| 1093 | SPANX-N1(494118) |
| 1094 | ITIH5(80760) |
| 1095 | PDPK1(5170) |
| 1096 | RAB40C(57799) |
| 1097 | SYT7(9066) |
| 1098 | RAB40C(57799) |
| 1099 | WIPI2(26100) |
| 1100 | ARGFX(503582) |
| 1101 | AP3S2(10239) |
| 1102 | EXOSC6(118460) |
| 1103 | MECP2(4204) |
| 1104 | PDXK(8566) |
| 1105 | TFCP2(7024) |
| 1106 | EIF3S1(8669) |
| 1107 | SNRP70(6625) |
| 1108 | ADCY1(107) |
| 1109 | PDPK1(5170) |
| 1110 | FGD3(89846) |
| 1111 | CBL(867) |
| 1112 | BOK(666) |
| 1113 | ADARB2(105) |
| 1114 | KLK9(284366) |
| 1115 | FN3K(64122) |
| 1116 | NFIX(4784) |

TABLE 2-31

| | |
|---|---|
| 1117 | IL17RE(132014) |
| 1118 | PIGA(5277) |
| 1119 | PRLR(5618) |
| 1120 | EVC(2121) |
| 1121 | SNX8(29886) |
| 1122 | CREB3L2(64764) |
| 1123 | KBTBD11(9920) |
| 1124 | SYNCRIP(10492) |
| 1125 | KIF1B(23095) |
| 1126 | APOL6(80830) |
| 1127 | CBX5(23468) |
| 1128 | RBMS2(5939) |
| 1129 | ZNF721(170960) |
| 1130 | PLXNA1(5361) |
| 1131 | ZNF440L(284390) |
| 1132 | APOE(348) |
| 1133 | NFATC1(4772) |
| 1134 | DISC1(27185) |
| 1135 | MAPK1(5594) |
| 1136 | POLR3H(171568) |
| 1137 | NKTR(4820) |
| 1138 | ABI2(10152) |
| 1139 | APOL6(80830) |
| 1140 | HOXA11(3207) |
| 1141 | RNF12(51132) |
| 1142 | TP53INP1(94241) |
| 1143 | CREB5(9586) |
| 1144 | TPPP(11076) |
| 1145 | H-plk(51351) |
| 1146 | ENTPD7(57089) |
| 1147 | ZNF440L(284390) |
| 1148 | AKNA(80709) |
| 1149 | DFFA(1676) |
| 1150 | FGFRL1(53834) |
| 1151 | RNF12(51132) |
| 1152 | PRX(57716) |
| 1153 | GIPC3(126326) |
| 1154 | RAB30(27314) |
| 1155 | NKTR(4820) |
| 1156 | SEPT5(5413) |
| 1157 | CD59(966) |
| 1158 | CBL(867) |
| 1159 | DDEF2(8853) |
| 1160 | LRPAP1(4043) |
| 1161 | LRPAP1(4043) |
| 1162 | JPH4(84502) |

TABLE 2-32

| | |
|---|---|
| 1163 | TP53INP1(94241) |
| 1164 | ELAVL1(1994) |
| 1165 | ZNF721(170960) |
| 1166 | CMTM4(146223) |
| 1167 | ERBB4(2066) |
| 1168 | GFPT1(2673) |
| 1169 | TOMM20(9804) |
| 1170 | AGPAT3(56894) |
| 1171 | GGTL3(2686) |
| 1172 | ADCY1(107) |
| 1173 | MLX(6945) |
| 1174 | AKNA(80709) |
| 1175 | ADCY1(107) |
| 1176 | OPCML(4978) |
| 1177 | NAV1(89796) |
| 1178 | RIMS3(9783) |
| 1179 | LYNX1(66004) |
| 1180 | LRRC14(9684) |
| 1181 | KCNA7(3743) |
| 1182 | TNRC6B(23112) |
| 1183 | SKIL(6498) |
| 1184 | SBK1(388228) |
| 1185 | ZNF264(9422) |
| 1186 | WDR33(55339) |
| 1187 | EXOSC6(118460) |
| 1188 | APOL6(80830) |
| 1189 | HCP1(113235) |
| 1190 | RASGRP4(115727) |
| 1191 | TFCP2L1(29842) |
| 1192 | CYP4F3(4051) |
| 1193 | BBS5(129880) |
| 1194 | ILF3(3609) |
| 1195 | LYNX1(66004) |
| 1196 | APOE(348) |
| 1197 | TBC1D16(125058) |
| 1198 | RAB40C(57799) |
| 1199 | FUT3(2525) |
| 1200 | PRX(57716) |
| 1201 | PRTG(283659) |
| 1202 | SNX27(81609) |
| 1203 | PIK3CD(5293) |
| 1204 | SLC1A2(6506) |
| 1205 | GGTL3(2686) |
| 1206 | ATP11A(23250) |
| 1207 | ZFP41(286128) |
| 1208 | SOX11(6664) |

TABLE 2-33

| | |
|---|---|
| 1209 | AFG3L1(172) |
| 1210 | FNDC6(152028) |
| 1211 | WNK3(65267) |
| 1212 | ZBTB7A(51341) |
| 1213 | JPH4(84502) |
| 1214 | PRX(57716) |
| 1215 | APOE(348) |
| 1216 | SGCD(6444) |
| 1217 | PRLR(5618) |
| 1218 | STOX2(56977) |
| 1219 | CBX5(23468) |
| 1220 | RNF12(51132) |
| 1221 | EVC(2121) |
| 1222 | DIDO1(11083) |
| 1223 | PRX(57716) |
| 1224 | TBC1D16(125058) |
| 1225 | CBX5(23468) |
| 1226 | SNX8(29886) |
| 1227 | AFG3L1(172) |
| 1228 | MAK10(60560) |
| 1229 | KCNK6(9424) |
| 1230 | EXOC5(10640) |
| 1231 | CDK6(1021) |
| 1232 | QSCN6(5768) |
| 1233 | EVC(2121) |
| 1234 | LRPAP1(4043) |
| 1235 | MDGA1(266727) |
| 1236 | ENTPD7(57089) |
| 1237 | CDR1(1038) |
| 1238 | ADCY1(107) |
| 1239 | CUGBP2(10659) |
| 1240 | ZC3HAV1(56829) |
| 1241 | LRPAP1(4043) |
| 1242 | LASS1(10715) |
| 1243 | FZR1(51343) |
| 1244 | CBX5(23468) |
| 1245 | LRRC14(9684) |
| 1246 | ENTPD7(57089) |
| 1247 | AFG3L1(172) |
| 1248 | DISC1(27185) |
| 1249 | TNRC6B(23112) |
| 1250 | PALM2(114299) |
| 1251 | ZNF721(170960) |
| 1252 | GIPC3(126326) |
| 1253 | CHKB(1120) |
| 1254 | PTPRT(11122) |

TABLE 2-34

| | |
|---|---|
| 1255 | ZNF660(285349) |
| 1256 | ADCY1(107) |
| 1257 | MECP2(4204) |
| 1258 | ZNF264(9422) |
| 1259 | PRX(57716) |
| 1260 | BOK(666) |
| 1261 | RNF12(51132) |
| 1262 | GABRA4(2557) |
| 1263 | WASF2(10163) |
| 1264 | TBC1D16(125058) |
| 1265 | RAB40C(57799) |
| 1266 | SEPT5(5413) |
| 1267 | CHES1(1112) |
| 1268 | TPPP(11076) |
| 1269 | TNRC6B(23112) |
| 1270 | ASB1(51665) |
| 1271 | AP4E1(23431) |
| 1272 | SEC14L1(6397) |
| 1273 | TNNI1(7135) |
| 1274 | POU3F3(5455) |
| 1275 | SEMA5A(9037) |
| 1276 | ABO(28) |
| 1277 | BRWD1(54014) |
| 1278 | MECP2(4204) |
| 1279 | GIPC3(126326) |
| 1280 | THUMPD1(55623) |
| 1281 | GDA(9615) |
| 1282 | FANCC(2176) |
| 1283 | AXL(558) |
| 1284 | POU2AF1(5450) |
| 1285 | PRKAA2(5563) |
| 1286 | RP6-166C19.1(255313) |
| 1287 | REEP3(221035) |
| 1288 | ADAM19(8728) |
| 1289 | TPPP(11076) |
| 1290 | KLF15(28999) |
| 1291 | VGLL4(9686) |
| 1292 | WHSC1(7468) |
| 1293 | TNRC6B(23112) |
| 1294 | TSPY2(64591) |
| 1295 | ZIC1(7545) |
| 1296 | QKI(9444) |
| 1297 | CBX5(23468) |
| 1298 | MAPK1(5594) |
| 1299 | FUT3(2525) |
| 1300 | GNG13(51764) |

TABLE 2-35

| | |
|---|---|
| 1301 | NKTR(4820) |
| 1302 | GOSR1(9527) |
| 1303 | TRIM2(23321) |
| 1304 | BRWD1(54014) |
| 1305 | MECP2(4204) |
| 1306 | NF1(4763) |
| 1307 | GFPT1(2673) |
| 1308 | EVC(2121) |
| 1309 | RP11-114H20.1(401589) |
| 1310 | CPLX2(10814) |
| 1311 | RASSF6(166824) |
| 1312 | NTRK2(4915) |
| 1313 | CALML4(91860) |
| 1314 | RBM33(155435) |
| 1315 | KLK9(284366) |
| 1316 | BRCA1(672) |
| 1317 | FMNL3(91010) |
| 1318 | THRB(7068) |
| 1319 | KLF12(11278) |
| 1320 | CALN1(83698) |
| 1321 | MAGI1(9223) |
| 1322 | TMEM132B(114795) |
| 1323 | FAM78A(286336) |
| 1324 | VGLL3(389136) |
| 1325 | CPLX2(10814) |
| 1326 | NTRK2(4915) |
| 1327 | RIMS4(140730) |
| 1328 | SPTLC2(9517) |
| 1329 | AFG3L1(172) |
| 1330 | RP11-145H9.1(340156) |
| 1331 | NDE1(54820) |
| 1332 | THRB(7068) |
| 1333 | GABRB2(2561) |
| 1334 | RCP9(27297) |
| 1335 | AFG3L1(172) |
| 1336 | PRLR(5618) |

[0143] The method of screening a substance that promotes or suppresses the expression or function of a nucleic acid such as a micro-RNA or a micro-RNA precursor using a nucleic acid of the present invention may be any method of screening for a substance that promotes or suppresses the expression or function of a nucleic acid such as a micro-RNA or a micro-RNA precursor using a nucleic acid of the present invention. For example, a method can be mentioned wherein a vector that expresses a nucleic acid, such as a micro-RNA or a micro-RNA precursor, of the present invention, is introduced into a cell, and a substance that suppresses the expression of a target gene thereof, or a substance that promotes the expression of a target gene thereof, is screened for.

[0144] Although the substance that suppresses the expression of a target gene may be any substance that suppresses the expression of the mRNA of the target gene, the substance is preferably a nucleic acid, more preferably an siRNA against the target gene. Although the substance that promotes the expression of a target gene may be any substance that promotes the expression of the mRNA of the target gene, the substance is preferably a nucleic acid, more preferably an siRNA against a micro-RNA that suppresses the expression of the target gene.

[0145] The cell incorporating a nucleic acid or vector of the present invention may be any cell incorporating the nucleic acid or vector of the present invention introduced in vitro. Specifically, mast cells and mast cell precursor cells, or, mesenchymal stem cells and cells resulting from differentiation of mesenchymal stem cells, for example, cells that are present in tissues such as the skin, lung, small intestine, nose, tonsil, blepharal conjunctiva, vascular walls, and bone marrow, or cells that are present in tissues such as bone marrow, fat tissue, umbilical blood, endometrium, dermis, skeletal muscles, periosteum, dental follicles, periodontal membranes, dental pulps, and dental germs, for example, osteoblasts, adipocytes, and muscle cells and the like, can be mentioned.

[0146] In the present invention, a mast cell refers to a cell that becomes activated by various stimuli to undergo degranulation and release or produce many inflammatory mediators, and is involved in the pathogenesis of various allergic diseases.

[0147] In the present invention, a mesenchymal stem cell refers to a cell that is present in mesenchymal tissues such as bone marrow, fat tissue, umbilical blood, endometrium, dermis, skeletal muscles, periosteum, dental follicles, periodontal membranes, dental pulps, and dental germs, and has the potential for differentiating at least into mesenchymal cells such as osteoblasts, adipocytes, and muscle cells.

[0148] A pharmaceutical with a nucleic acid of the present invention as an active ingredient can be used to diagnose or treat a disease caused by a mast cell abnormality. Because mast cell abnormalities include degranulation abnormalities, a nucleic acid of the present invention can also be used as a mast cell degranulation promoter or degranulation suppressant. A substance that promotes or suppresses the expression or function of a nucleic acid, such as a micro-RNA or a micro-RNA precursor, of the present invention, and a substance that suppresses or promotes the expression of a target gene of a nucleic acid, such as a micro-RNA, of the present invention, can also be used to diagnose or treat a disease caused by a mast cell abnormality. These substances can also be used as mast cell degranulation promoters or degranulation suppressants.

[0149] As diseases caused by a mast cell abnormality, specifically, atopic dermatitis, asthma, chronic obstructive lung disease, and allergic diseases and the like can be mentioned.

[0150] A pharmaceutical with a nucleic acid of the present invention as an active ingredient can be used to diagnose or treat a disease caused by an abnormality of mesenchymal stem cell proliferation and/or differentiation. A substance that promotes or suppresses the expression or function of a nucleic acid, such as a micro-RNA or a micro-RNA precursor, of the present invention, and a substance that suppresses or promotes the expression of a target gene of a nucleic acid, such as a micro-RNA, of the present invention, can also be used to diagnose or treat a disease caused by an abnormality of mesenchymal stem cell proliferation and/or differentiation.

[0151] As diseases caused by an abnormality of mesenchymal stem cell proliferation and/or differentiation, specifically, cancers and dysosteogenesis, achondroplasia, diabetes and the like can be mentioned.

[0152] A pharmaceutical with a nucleic acid of the present invention as an active ingredient can be used to diagnose or treat a disease caused by an abnormality of cell proliferation and the like, tissue hyperplasia and the like. A nucleic acid of the present invention can also be used as a cell proliferation suppressant or proliferation promoter. A substance that promotes or suppresses the expression or function of a nucleic acid, such as a micro-RNA or a micro-RNA precursor, of the present invention, and a substance that suppresses or promotes the expression of a target gene of a nucleic acid, such as a micro-RNA, of the present invention, can also be used to diagnose or treat a disease caused by an abnormality of cell proliferation and the like, tissue hyperplasia and the like. These substances can also be used as cell proliferation suppressants or proliferation promoters. Here, an abnormality of cell proliferation refers to a condition wherein cells are proliferating at a rate that is not a normal proliferation rate in a living organism.

[0153] As diseases caused by a cell proliferation abnormality, tissue hyperplasia and the like, specifically, cancers, arteriosclerosis, rheumatoid arthritis, prostatic hyperplasia, blood vessel restenosis after percutaneous transvascular coronary angioplasty, fibroid lung, glomerulonephritis, autoimmune diseases and the like can be mentioned.

[0154] Hereinafter, the present invention is described in detail with reference to cases wherein the nucleic acid of the present invention is micro-RNA or micro-RNA precursor.

### 1. Identification of Micro-RNAs and Micro-RNA Precursors Expressed in Mast Cells

### (1-1) Acquirement and Cultivation of Mast Cells

[0155] The method of acquiring human mast cells is not particularly limited, as far as it ensures safe and efficient acquirement; for example, human mast cells can be prepared from the human lung, skin, fetal liver and the like by known methods [J. Immunol. Methods, 169, 153 (1994); J. Immunol., 138, 861 (1987); J. Allergy Clin. Immunol., 107, 322 (2001); J. Immunol. Methods., 240, 101 (2000)]. Human mast cells can also be prepared by culturing mononuclear cells prepared from human umbilical blood, peripheral blood, bone marrow, lung or skin in the presence of stem cell factor (hereinafter also referred to as SCF) to differentiate them into mast cells in accordance with known methods [J. Immunol., 157, 343, (1996); Blood, 91, 187 (1998); J. Allergy Clin. Immunol., 106, 141 (2000); Blood, 97, 1016 (2001); Blood, 98, 1127 (2001); Blood, 100, 3861 (2002); Blood, 97, 2045 (2001)].

[0156] A cell line established from a human mast cell can also be used. As a human mast cell line, LAD2, which is known to well retain the nature of human mast cells [Leuk. Res., 27, 671 (2003); Leuk. Res., 27, 677 (2003)] and the like can be mentioned.

### (1-2) Acquirement of Low-Molecular RNA and Sequence Information

[0157] Total RNA is extracted from mast cells acquired by the various methods described above, and using the RNA, a low-molecular RNA comprising a micro-RNA expressed in mast cells can be acquired as described below.

[0158] As a method of acquiring a low-molecular RNA, specifically, a method wherein separation and cutting out of a low-molecular RNA by 15% polyacrylamide gel electrophoresis, 5′ terminal dephosphorylation, 3′-adapter ligation, phosphorylation, 5′-adapter ligation, reverse transcription, PCR amplification, concatemerization, and ligation to a vector are performed sequentially, thereafter the low-molecular RNA is cloned, and the nucleotide sequence of the clone is determined, as described in Genes & Development 15, 188-200 (2000), and the like can be mentioned. Alternatively, for example, a method wherein separation and cutting off of a low-molecular RNA by 15% polyacrylamide gel electrophoresis, 5′-adenylation 3′-adapter ligation, 5′-adapter ligation, reverse transcription, PCR amplification, concatemerization, and ligation to a vector are performed sequentially, thereafter the low-molecular RNA is cloned, and the nucleotide sequence of the clone is determined, as described in Science 294, 858-862 (2001), and the like can be mentioned.

[0159] Alternatively, separation and cutting off of a low-molecular RNA by 15% polyacrylamide gel electrophoresis, 5′ terminal dephosphorylation, 3′-adapter ligation, phosphorylation, 5′-adapter ligation, reverse transcription, PCR amplification, and ligation to a microbead vector are performed sequentially, thereafter the low-molecular RNA is cloned, and the nucleotide sequence of the microbeads is read to determine the nucleotide sequence, whereby the low-molecular RNA can also be acquired, as described in Nucleic Acids Research 34, 1765-1771 (2006).

[0160] A low-molecular RNA can also be acquired using a small RNA Cloning Kit (manufactured by Takara Bio Inc.).

### (1-3) Identification of Micro-RNA

[0161] Whether or not the low-molecular RNA sequence acquired is a micro-RNA can be determined on the basis of whether or not the criteria described in RNA, 9, 277-279 (2003) are met. For example, in cases where the low-molecular RNA was acquired and the nucleotide sequence thereof was determined by a method described above, this can be performed as described below.

[0162] Specifically, a surrounding genome sequence wherein a DNA sequence corresponding to the nucleotide sequence of the low-molecular RNA acquired is extended by about 50 nt toward the 5′ terminal side and the 3′ terminal side, respectively, is acquired, and the secondary structure of the RNA expected to be transcribed from the genome sequence is predicted. If the result shows that a hairpin structure is present and the nucleotide sequence of the low-molecular RNA is located in one chain of the hairpin, the low-molecular RNA can be judged to be a micro-RNA. Genome sequences are open to the general public, and are available from, for example, UCSC Genome Bioinformatics (http://genome.ucsc.edu/). For prediction of secondary structures, various programs are open; for example, RNAfold [Nucleic Acids Research 31, 3429-3431 (2003)], Mfold [Nucleic Acids Research 31, 3406-3415 (2003)] and the like can be used. Existing micro-RNA sequences are registered in a database called miRBase (http://microrna.sanger.ac.uk/); whether or not a micro-RNA is identical to an existing micro-RNA can be determined on the basis of whether or not the sequence thereof is identical to one of the sequences listed therein.

[0163] As examples of the thus-identified micro-RNA expressed in mast cells, a nucleic acid having the nucleotide sequence of any one of SEQ ID NOs:1 to 1336 can be mentioned.

[0164] A genome sequence corresponding to the micro-RNA identified and the genome sequence of another organism may be compared, and a nucleic acid having a nucleotide sequence having an identity of 60% or more to the nucleotide sequence of any of SEQ ID NOs:1 to 1336, preferably a nucleic acid having a nucleotide sequence having an identify of 90% or more and more preferably 95% or more, can be identified as a micro-RNA in the organism.

### (1-4) Identification of Micro-RNA Precursor

[0165] On the basis of the nucleotide sequence of the micro-RNAs identified in (1-3) above, a sequence comprising the sequence that encodes a micro-RNA can be identified as the sequence that encodes a micro-RNA precursor. As examples of a micro-RNA precursor of the present invention expressed in mast cells, a nucleic acid having the nucleotide sequence of any one of SEQ ID NOs:1337 to 2851 and the like can be mentioned.

[0166] Furthermore, a genome sequence corresponding to the micro-RNA precursor identified and the genome sequence of another organism may be compared, and a nucleic acid having a nucleotide sequence having an identity of 80% or more, preferably 90% or more, and more preferably 95% or more, and still more preferably 97% or more, to the nucleotide sequence of any one of SEQ ID NOs:1337 to 2851, can be identified as a micro-RNA precursor in the organism.

### 2. Synthesis of Nucleic Acid

[0167] After a micro-RNA and a micro-RNA precursor expressed in mast cells are once identified, as described in 1 above, not only an RNA, which is a polymer of a ribonucleotide, but also a DNA, which is a polymer of a deoxyribonucleotide, can be synthesized on the basis of the nucleotide sequences. For example, on the basis of the nucleotide sequence of the RNA identified in 1 above, the nucleotide sequence of a DNA can be determined. The nucleotide sequence of a DNA corresponding to the nucleotide sequence of an RNA can be determined, without exception, by reading the U (uracil) contained in the sequence of the RNA as T (thymine). A polymer being a mixture of a ribonucleotide and a deoxyribonucleotide and a polymer comprising a nucleotide analogue can also be synthesized in the same manner.

[0168] The method of synthesizing a nucleic acid such as micro-RNA or micro-RNA precursor of the present invention is not particularly limited; the same can be produced by a method using a known chemical synthesis, or an enzymatic transcription method and the like. As methods using a known chemical synthesis, the phosphoroamidite method, the phosphorothioate method, the phosphotriester method, the CEM method [Nucleic Acid Research, 35, 3287 (2007)] and the like can be mentioned; for example, a nucleic acid such as micro-RNA or micro-RNA precursor of the present invention can be synthesized using the ABI3900 high throughput nucleic acid synthesizer (manufactured by Applied Biosystems). As an enzymatic transcription method, transcription with a plasmid or DNA having a desired nucleotide sequence as the template using a typical phage RNA polymerase, for example, T7, T3, or SP6RNA polymerase, can be mentioned.

### 3. Method of Detecting Functions of Micro-RNA and Precursor of the Micro-RNA

[0169] A micro-RNA is produced via processing of a micro-RNA precursor having a hairpin structure by a protein called Dicer, a kind of RNaseIII endonuclease, in cytoplasm, and suppresses the translation of an mRNA having a target nucleotide sequence. Therefore, whether or not the nucleic acid obtained is a micro-RNA can be determined on the basis of whether or not the function is present.

[0170] For example, on the basis of whether or not the RNA undergoes processing by RNaseIII endonuclease, whether or not the same functions as a micro-RNA precursor can be measured. Specifically, a single-stranded RNA whose function is to be detected is reacted with RNaseIII endonuclease, and the reaction product is electrophoresed; if a function as a micro-RNA precursor is possessed, a band about 20 to 25 nucleotides long resulting from the processing will be detected, whereby the RNA is judged to possess a function as a micro-RNA. Although an RNaseIII endonuclease is not particularly limited, as far as it possesses an activity to process the micro-RNA precursor, it is preferable to use a Dicer protein. Specifically, si-RNAse III™ (manufactured by Takara Bio Inc.), Cold Shock-DICER (manufactured by Takara Bio Inc.), Recombinant Dicer Enzyme (manufactured by Stratagene), BLOCK-iT Dicer RNAi Transfection Kit (manufactured by Invitrogen), X-treme GENE siRNA Dicer Kit (manufactured by Roche-Applied Science) and the like can be used, and the measurement can be made according to the reaction conditions given in the attached instructions.

[0171] As a method of detecting a function of a micro-RNA, a method can be mentioned wherein the function is measured on the basis of whether or not the translation of a mRNA having a target nucleotide sequence is suppressed.

[0172] Micro-RNAs are known to suppress the translation of an mRNA comprising a target nucleotide sequence thereof in the untranslated region on the 3′ side (3′UTR) [Current Biology, 15, R458-R460 (2005)]. Hence, a DNA wherein a target nucleotide sequence for the single-stranded RNA to be measured is inserted into the 3′UTR of an appropriate reporter gene expression vector is prepared and introduced into a host cell suitable for the expression vector, and the expression of the reporter gene is measured when the cell is allowed to express the single-stranded. RNA, whereby whether or not a function of a micro-RNA is possessed can be detected.

[0173] The reporter gene expression vector may be any one, as far as it has a promoter upstream of a reporter gene, and is capable of expressing the reporter gene in the host cell. Any reporter gene can be used; for example, the firefly luciferase gene, the Renilla luciferase gene, the chloramphenicol acetyltransferase gene, the β-glucuronidase gene, the β-galactosidase gene, the β-lactamase gene, the aequorin gene, the green fluorescent protein gene, the DsRed fluorescent gene and the like can be utilized. As examples of reporter gene expression vectors having these properties, psiCHECK-1 (manufactured by Promega), psiCHECK-2 (manufactured by Promega), pGL3-Control (manufactured by Promega), pGL4 (manufactured by Promega), pRNAi-GL (manufactured by Takara Bio Inc.), pCMV-DsRed-Express (manufactured by CLONTECH) and the like can be mentioned. An RNA can be expressed by the method described in 6 below.

[0174] A function of a micro-RNA can be detected, specifically as described below. First, a host cell is cultured on a multiwell plate or the like, and a reporter gene expression vector having a target nucleotide sequence and an RNA are expressed. Thereafter, reporter activity is measured, and a reduction in the reporter activity is detected when the RNA is expressed compared with the RNA being not expressed, whereby a function of the micro-RNA can be detected.

### 4. Method of Detecting the Expression of a Nucleic Acid Such as a Micro-RNA or a Micro-RNA Precursor Using a Nucleic Acid of the Present Invention

[0175] Hereinafter, methods of detecting the expression of a nucleic acid such as a micro-RNA or a precursor thereof using a nucleic acid of the present invention are described.

[0176] As examples of methods of detecting the expression of a 15 micro-RNA, a micro-RNA precursor and the like, (1) Northern hybridization, (2) dot blot hybridization, (3) in situ hybridization, (4) quantitative PCR, (5) differential hybridization, (6) microarray, (7) ribonuclease protection assay and the like can be mentioned.

[0177] The Northern blot method is a method wherein a sample-derived RNA is separated by gel electrophoresis, then transferred to a support such as a nylon filter, and an appropriately-labeled probe is prepared on the basis of the nucleotide sequence of a nucleic acid of the present invention, and hybridization and washing are performed, whereby a band specifically bound to the nucleic acid of the present invention is detected; specifically, for example, this method can be performed as described in Science 294, 853-858 (2001) and the like.

[0178] A labeled probe can be prepared by incorporating a radioisotope, biotin, digoxigenin, a fluorescent group, a chemiluminescent group and the like in a DNA, RNA, or LNA and the like having a sequence complementary to the nucleotide sequence of a nucleic acid of the present invention by a method, for example, nick translation, random priming or 5′-terminal phosphorylation. Because the amount of labeled probe bound reflects the expression level of a nucleic acid such as a micro-RNA or a micro-RNA precursor, the expression level of a micro-RNA, micro-RNA precursor or the like can be quantified by quantifying the amount of labeled probe bound. Electrophoresis, membrane transfer, probe preparation, hybridization, and nucleic acid detection can be achieved by a method described in Molecular Cloning, 3rd edition, and Cold Spring Harbor Laboratory Press, NY, USA (2001).

[0179] Dot blot hybridization is a method wherein a nucleic acid extracted from a tissue or a cell is spotted in dot forms and immobilized on a membrane, and hybridized with a probe, and a nucleic acid that specifically hybridizes with the probe is detected. The probe used may be the same as that used for Northern hybridization. A nucleic acid preparation, spotting, hybridization, and detection can be achieved by a method described in Molecular Cloning, 3rd edition.

[0180] In situ hybridization is a method wherein a paraffin-embedded or cryostat-treated section of a tissue acquired from a living organism, or a cell fixed, is used as a sample and subjected to steps for hybridization with a labeled probe and washing, and the distribution and localization of a micro-RNA, micro-RNA precursor and the like in the tissue or cell are examined by microscopic examination [Methods in Enzymology, 254, 419 (1995)]. The probe used may be the same as that used for Northern hybridization. Specifically, a micro-RNA, micro-RNA precursor and the like can be detected in accordance with a method described in Nature Method 3, 27 (2006).

[0181] In quantitative PCR, a cDNA synthesized from a sample-derived RNA using a primer for reverse transcription and a reverse transcriptase (hereunder, this cDNA is referred to as a sample-derived cDNA) is used for the measurement. As a primer for reverse transcription to be supplied for cDNA synthesis, a random primer or a specific RT primer and the like can be used. A specific RT primer refers to a primer having a sequence complementary to a nucleotide sequence corresponding to a micro-RNA, micro-RNA precursor of the present invention and the like, and a genome sequence therearound.

[0182] For example, a sample-derived cDNA is synthesized, after which a PCR is performed with this cDNA as the template, using a template-specific primer designed from a nucleotide sequence corresponding to a micro-RNA, micro-RNA precursor and a genome sequence therearound, or from a nucleotide sequence corresponding to a primer for reverse transcription, to amplify a cDNA fragment and the amount of the micro-RNA and micro-RNA precursor contained in the sample-derived RNA is detected from the number of cycles for reach to a given amount of the fragment. As the template-specific primer, an appropriate region corresponding to a micro-RNA, micro-RNA precursor and a genome sequence therearound is selected, and a pair of a DNA or LNA consisting of a sequence of 20 to 40 nucleotides at the 5′ terminus of the nucleotide sequence of the region, and a DNA or LNA consisting of a sequence complementary to a sequence of 20 to 40 nucleotides at the 3′ terminus can be used. Specifically, this can be performed in accordance with a method described in Nucleic Acids Research, 32, e43 (2004) and the like.

[0183] Alternatively, as the primer for reverse transcription to be supplied for cDNA synthesis, a specific RT primer having a stem-loop structure can also be used. Specifically, this can be performed using a method described in Nucleic Acid Research, 33, e179 (2005), or TaqMan MicroRNA Assays (manufactured by Applied Biosystems).

[0184] As another method of synthesizing a sample-derived cDNA, a polyA sequence is added to a sample-derived RNA by means of polyA polymerase, and a nucleotide sequence comprising an oligodT sequence is used as a primer for reverse transcription, whereby a reverse transcription reaction can be performed. Specifically, this can be performed using the miScript System (manufactured by QIAGEN) or the QuantiMir RT Kit (manufactured by System Biosciences).

[0185] In addition, by hybridizing a sample-derived cDNA to a substrate such as a filter, glass slide, or silicone having a DNA or LNA corresponding to a nucleotide sequence comprising at least one or more of a nucleic acid such as micro-RNA, micro-RNA precursor of the present invention and the like immobilized thereon, and performing washing, a change in the amount of the micro-RNA, micro-RNA precursor of the present invention and the like can be detected. As such methods based on hybridization, methods using differential hybridization [Trends Genet., 7, 314 (1991)] or a microarray [Genome Res., 6, 639 (1996)] can be mentioned. Both methods enable accurate detection of a difference in the amount of a micro-RNA, a micro-RNA precursor or the like between a control sample and a target sample by immobilizing an internal control, such as a nucleotide sequence corresponding to U6 RNA, on a filter or a substrate. Also, by synthesizing labeled cDNAs using differently labeled dNTPs (mixtures of dATP, dGTP, dCTP, and dTTP) on the basis of RNAs derived from a control sample and a target sample, and simultaneously hybridizing the two labeled cDNAs to a single filter or a single substrate, accurate quantitation of the micro-RNA, micro-RNA precursor and the like can be performed. Furthermore, quantitation of a micro-RNA, a micro-RNA precursor or the like can also be performed by directly labeling and hybridizing an RNA derived from a control sample and/or a target sample. For example, a micro-RNA or the like can be detected using microarrays described in Proc. Natl. Acad. Sci. USA, 101, 9740-9744 (2004), Nucleic Acid Research, 32, e188 (2004) and the like. Specifically, a micro-RNA or the like can be detected or quantified using mirVana miRNA Bioarray (manufactured by Ambion).

[0186] In ribonuclease protection assay, first, a promoter sequence such as the T7 promoter or the SP6 promoter is bound to the 3′ terminus of a nucleotide sequence corresponding to a micro-RNA, micro-RNA precursor of the present invention or a genome sequence therearound, and a labeled antisense RNA is synthesized with an in vitro transcription system using a labeled NTP (a mixture of ATP, GTP, CTP, and UTP) and an RNA polymerase. The labeled antisense RNA is bound to a sample-derived RNA to form an RNA-RNA hybrid, after which the hybrid is digested with ribonuclease A, which degrades single-stranded RNAs only. The digest is subjected to gel electrophoresis to detect or quantify an RNA fragment protected against the digestion by forming the RNA-RNA hybrid, as a micro-RNA or micro-RNA precursor. Specifically, the fragment can be detected or quantified a micro-RNA and the like using the mirVana miRNA Detection Kit (manufactured by Ambion).

### 5. Method of Detecting Mutations of a Nucleic Acid Such as Micro-RNA, Micro-RNA Precursor and the Like Using a Nucleic Acid of the Present Invention

[0187] Hereinafter, methods of detecting mutations of a nucleic acid such as a micro-RNA or a micro-RNA precursor using a nucleic acid of the present invention are described.

[0188] As a method of detecting mutations of a micro-RNA, micro-RNA precursor and the like, a method can be used wherein a heteroduplex formed by hybridization of the normal form of the micro-RNA and a mutated form of the micro-RNA, or of the normal form of the micro-RNA precursor and a mutated form of the micro-RNA precursor, is detected.

[0189] As methods of detecting a heteroduplex, (1) detection of a heteroduplex by polyacrylamide gel electrophoresis [Trends genet., 7, 5 (1991)], (2) single-strand conformation polymorphism analysis [Genomics, 16, 325-332 (1993)], (3) chemical cleavage of mismatches (CCM) [Human Genetics (1996), Tom Strachan and Andrew P. Read, BIOS Scientific Publishers Limited], (4) enzymatic cleavage of mismatches [Nature Genetics, 9, 103-104 (1996)], (5) denatured gel electrophoresis [Mutat. Res., 288, 103-112 (1993)] and the like can be mentioned.

[0190] Detection of a heteroduplex by polyacrylamide gel electrophoresis is, for example, performed as described below. First, with a sample-derived DNA or a sample-derived cDNA as the template, and using a primer designed on the basis of a genome nucleotide sequence comprising the nucleotide sequence of a micro-RNA and micro-RNA precursor of the present invention and the like, a fragment smaller than 200 by is amplified. Heteroduplexs, if formed, are slower in mobility than mutation-free homo-double-strands, and can be detected as extra bands. Better separation is achieved using a custom-made gel (Hydro-link, MDE and the like). In the case of search for a fragment smaller than 200 bp, insertions, deletions, and most single-nucleotide substitutions can be detected. It is desirable that heteroduplex analysis be performed using a single gel in combination with the single strand conformation analysis described below.

[0191] In single strand conformation polymorphism analysis (SSCP analysis), a DNA amplified as a fragment smaller than 200 by with a sample-derived DNA or sample-derived cDNA as the template, using a primer designed on the basis of a genome nucleotide sequence comprising the nucleotide sequence of a micro-RNA, micro-RNA precursor and the like, is denatured, after which it is electrophoresed in non-denatured polyacrylamide gel. By labeling the primer with an isotope or a fluorescent dye at the time of DNA amplification, or by silver-staining the non-labeled amplification product, the amplified DNA can be detected as a band. To clarify a difference from the wild type pattern, a control sample may be electrophoresed simultaneously, whereby a fragment with a mutation can be detected on the basis of a difference in mobility.

[0192] In chemical cleavage of mismatches (CCM method), a DNA fragment amplified with a sample-derived DNA or sample-derived cDNA as the template, using a primer designed on the basis of a genome nucleotide sequence comprising the nucleotide sequence of a micro-RNA, micro-RNA precursor and the like, is hybridized to a labeled nucleic acid prepared by allowing a nucleic acid of the present invention to incorporate an isotope or a fluorescent target, and treated with osmium tetraoxide to cleave one strand of the DNA at the mismatched portion, whereby a mutation can be detected. CCM is one of the most sensitive methods of detection, and can be applied to samples of kilobase length.

[0193] In place of osmium tetraoxide used above, T4 phage resolvase and an enzyme involved in mismatch repair in cells, such as endonuclease VII, and RNaseA may be used in combination to enzymatically cleave a mismatch.

[0194] In denaturing gradient gel electrophoresis (DGGE method), a DNA amplified with a sample-derived DNA or sample-derived cDNA as the template, using a primer designed on the basis of a genome nucleotide sequence comprising the nucleotide sequence of a micro-RNA, micro-RNA precursor and the like, is electrophoresed using a gel having a chemical denaturant density gradient or a temperature gradient. The DNA fragment amplified migrates in the gel to a position where it denatures to a single strand, and no longer migrates after the denaturation. Because the migration of the amplified DNA in the gel differs between the presence and absence of a mutation, the presence of the mutation can be detected. To increase the detection sensitivity, the addition of a poly (G:C) end to each primer is effective.

[0195] By directly determining and analyzing the nucleotide sequence of a sample-derived DNA or sample-derived cDNA, a mutation of a micro-RNA, micro-RNA precursor and the like can also be detected.

### 6. Method of Expressing a Nucleic Acid Such as Micro-RNA or Micro-RNA Precursor of the Present Invention, and the Like

[0196] A nucleic acid of the present invention, such as a micro-RNA or a micro-RNA precursor, can be expressed by using an expression vector that encodes the nucleic acid.

[0197] As an expression vector, a plasmid, viral vector or the like capable of self-replication in the host cell, or capable of being incorporated in the chromosome, that comprises a promoter at a position enabling the transcription of the gene of a nucleic acid, such as a micro-RNA or a micro-RNA precursor, of the present invention of the present invention is preferably used. The promoter may be any one, as far as it is capable of expressing in the host cell; for example, a RNA polymerase II (pol II) system promoter, a RNA polymerase III (pol III) system promoter being a U6 RNA and H1 RNA transcription system and the like can be mentioned. As examples of pol II system promoters, the promoter of the cytomegalovirus (human CMV) IE (immediate early) gene, the early promoter of SV40 and the like can be mentioned. As examples of expression vectors using them, pCDNA6.2-GW/miR (manufactured by Invitrogen), pSilencer 4.1-CMV (manufactured by Ambion) and the like can be mentioned. As pol III system promoters, U6 RNA, H1 RNA or tRNA promoters can be mentioned. As examples of expression vectors using them, pSINsi-hH1 DNA (manufactured by Takara Bio Inc.), pSINsi-hU6 DNA (manufactured by Takara Bio Inc.), pENTR/U6 (manufactured by Invitrogen) and the like can be mentioned. When a micro-RNA, a micro-RNA precursor or the like is to be expressed in vitro, an expression vector having the T7 promoter, the T3 promoter or the SP6 promoter is preferably used. As examples of vectors having these promoters, pBluescript II SK(+) (manufactured by Stratagene) and the like can be mentioned.

[0198] When a plasmid is used, by preparing a DNA fragment comprising a hairpin portion on the basis of the nucleotide sequence of a micro-RNA, a micro-RNA precursor or the like of the present invention, or the nucleotide sequence of a genome comprising the foregoing nucleotide sequence, and inserting the fragment downstream of a promoter of the plasmid to construct a recombinant plasmid, and then introducing the plasmid into a host cell suitable for the plasmid, or mixing the plasmid with RNA polymerase, a nucleotide or the like in vitro, a nucleic acid, such as a micro-RNA or a micro-RNA precursor, of the present invention, can be expressed.

[0199] When a viral vector is used, by inserting a gene comprising the nucleotide sequence of a nucleic acid, such as a micro-RNA or a micro-RNA precursor, of the present invention, downstream of a promoter in the viral vector to construct a recombinant viral vector, and introducing the vector into a packaging cell to produce a recombinant virus, the gene of the nucleic acid such as the micro-RNA or micro-RNA precursor can be expressed.

[0200] The packaging cell may be any cell, as far as it is capable of supplementing a recombinant viral vector deficient in any one of the genes that encode the proteins necessary for the packaging of the virus with the lacked protein; for example, human kidney-derived HEK293 cells, mouse fibroblasts NIH3T3-derived cells and the like can be used. As the protein supplemented by the packaging cell, in the case of a retrovirus vector, proteins derived from a mouse retrovirus, such as gag, pol, and env, can be used; in the case of a lentivirus vector, proteins derived from a HIV virus, such as gag, pol, env, vpr, vpu, vif, tat, rev, and nef, can be used; in the case of an adenovirus vector, proteins derived from an adenovirus, such as E1A and E1B, can be used; in the case of an adeno-associated viral vector, proteins such as Rep (p5, p19, p40) and Vp(Cap), can be used.

[0201] In addition to using an expression vector, a nucleic acid such as micro-RNA and micro-RNA precursor of the present invention and the like can also be introduced directly into a cell, without using a vector. As the nucleic acid used in this technique, a DNA, an RNA, or a nucleotide analogue, as well as a chimeric molecule thereof, or a derivative of the nucleic acid can also be used. Specifically, Pre-miR™ miRNA Precursor Molecules (manufactured by Ambion) and miRIDIAN microRNA Mimics (manufactured by GE Healthcare) can be used.

### 7. Methods of Promoting or Suppressing or Promoting the Expression or Function of a Nucleic Acid Such as a Micro-RNA or Micro-RNA Precursor of the Present Invention

[0202] The expression or function of a nucleic acid such as micro-RNA and micro-RNA precursor of the present invention and the like can be suppressed using an antisense technology [Baiosaiensu To Indasutorii, 50, 322 (1992); Kagaku, 46, 681 (1991), Biotechnology, 9, 358 (1992), Trends in Biotechnology, 10, 87 (1992), Trends in Biotechnology, 10, 152 (1992); SAIBO KOGAKU, 16, 1463 (1997)], triple helix technology [Trends in Biotechnology, 10, 132 (1992)], ribozyme technology [Current Opinion in Chemical Biology, 3, 274 (1999), FEMS Microbiology Reviews, 23, 257 (1999), Frontiers in Bioscience, 4, D497 (1999), Chemistry & Biology, 6, R33 (1999), Nucleic Acids Research, 26, 5237 (1998), Trends In Biotechnology, 16, 438 (1998)], decoy DNA method [Nippon Rinsho—Japanese Journal of Clinical Medicine, 56, 563 (1998), Circulation Research, 82, 1023 (1998), Experimental Nephrology, 5, 429 (1997), Nippon Rinsho—Japanese Journal of Clinical Medicine, 54, 2583 (1996)], or a siRNA (short interfering RNA).

[0203] An antisense refers to one that allows nucleotide sequence-specific hybridization of a nucleic acid having a nucleotide sequence complementary to a certain target nucleic acid to suppress the expression or function of the target nucleic acid. As the nucleic acid used as the antisense, a DNA, an RNA or a nucleotide analogue, as well as a chimeric molecule thereof, or a derivative of the nucleic acid can also be used. Specifically, an antisense can be prepared by following the method described in Nature 432, 226 (2004) and the like, and the expression or function can be suppressed. Specifically, by using Anti-miR™ miRNA Inhibitors (manufactured by Ambion) or miRIDIAN microRNA Inhibitors (manufactured by GE Healthcare), the expression or function of a nucleic acid, such as a micro-RNA or a micro-RNA precursor, of the present invention, can be suppressed.

[0204] An siRNA refers to a short double-stranded RNA comprising the nucleotide sequence of a certain target nucleic acid, that is capable of suppressing the expression or function of the target nucleic acid by RNA interference (RNAi). The sequence of an siRNA can be designed as appropriate from the target nucleotide sequence on the basis of conditions shown in the literature [Genes Dev., 13, 3191 (1999)]. By synthesizing two RNAs having a sequence of 17 to 30 nucleotides, preferably 18 to 25 nucleotides, more preferably 19 to 23 nucleotides, selected and a complementary sequence, with TT added to the 3′ terminus of each thereof, using a nucleic acid synthesizer, and performing annealing, an siRNA can be prepared. By inserting a DNA corresponding to the above-described selected sequence of 17 to 30 nucleotides, preferably 18 to 25 nucleotides, more preferably 19 to 23 nucleotides, into an siRNA expression vector such as pSilencer 1.0-U6 (manufactured by Ambion) or pSUPER (OligoEngine), a vector that expresses an siRNA capable of suppressing the expression or function of the gene can also be prepared.

[0205] Using an antisense or siRNA specific for a micro-RNA or micro-RNA precursor expressed in mast cells, mesenchymal stem cells or cancer cells, the expression or function of a micro-RNA or micro-RNA precursor expressed in mast cells, mesenchymal stem cells or cancer cells can be suppressed. Specifically, by administering the antisense or siRNA specific for a micro-RNA, the expression or function of the micro-RNA can be suppressed, and the action of the micro-RNA or micro-RNA precursor in mast cells, mesenchymal stem cells or cancer cells can be controlled.

[0206] Referring to a specific example, an antisense or siRNA specific for a micro-RNA of any one of SEQ ID NOs:1, 2, 3, 8, 14, 20, 22, 25, 32 and 36 or a micro-RNA precursor of any one of SEQ ID NOs:1337, 1338, 1339, 1352, 1363, 1371, 1373, 1377, 1386 and 1390 can be used as a mast cell degranulation suppressant. An antisense or siRNA specific for a micro-RNA of SEQ ID NOs:1, 8, 21 and 36 or a micro-RNA precursor of any one of SEQ ID NOs:1337, 1352, 1372 and 1390 can be used as a mesenchymal stem cell proliferation suppressant or proliferation promoter. Furthermore, an antisense or siRNA specific for a micro-RNA of any one of SEQ ID NOs:1, 3, 8, 20, 21, 22, 32 and 36 or a micro-RNA precursor of any one of SEQ ID NOs:1337, 1339, 1352, 1371, 1372, 1373, 1386 and 1390 can be used as a cell proliferation promoter.

[0207] In the case of a patient affected by an abnormality of the expression of a micro-RNA or micro-RNA precursor expressed in mast cells, mesenchymal stem cells or cancer cells, by administering an antisense or siRNA specific for the micro-RNA or precursor thereof to the patient, it is possible to control a function of mast cells, mesenchymal stem cells or cancer cells to treat a disease that develops as a result of the above-described expressional abnormality. Hence, an antisense or siRNA that is specific for the micro-RNA or precursor thereof is useful as a therapeutic agent for a disease caused by an abnormality of mast cells or mesenchymal stem cells, or a disease caused by a cell proliferation abnormality.

[0208] When an antisense or siRNA that is specific for the micro-RNA or precursor thereof is used as the above-described therapeutic agent, the antisense or siRNA, alone or after being inserted into an appropriate vector such as a retrovirus vector, adenovirus vector, or adeno-associated viral vector, can be administered in the form of a pharmaceutical preparation prepared by the conventional method described in 11 below.

[0209] Meanwhile, as substances that promote the expression or function of a nucleic acid, such as a micro-RNA or a micro-RNA precursor, of the present invention, the micro-RNA and the micro-RNA precursor, a micro-RNA and micro-RNA precursor that share the same target nucleotide sequence therewith, and an expression vector that encodes the same, as well as factors involved in the processing of micro-RNA precursors, such as Dicer, can be mentioned. An expression vector that encodes a micro-RNA, micro-RNA precursor or the like can be produced by the methods mentioned in the foregoing 6.

[0210] Using a micro-RNA or micro-RNA precursor expressed in mast cells, mesenchymal stem cells or cancer cells, a micro-RNA or micro-RNA precursor that shares the same target nucleotide sequence therewith, and an expression vector that encodes the same, the expression or function of a micro-RNA or micro-RNA precursor expressed in mast cells, mesenchymal stem cells or cancer cells can be promoted. Hence, by administering them, it is possible to promote the expression or function of the micro-RNA to control the action of micro-RNA and micro-RNA precursor in mast cells, mesenchymal stem cells or cancer cells.

[0211] Referring to specific examples, the micro-RNA of any one to of SEQ ID NOs:1, 2, 3, 8, 14, 20, 22, 25, 32 and 36 or the micro-RNA precursor of any one of SEQ ID NOs:1337, 1338, 1339, 1352, 1363, 1371, 1373, 1377, 1386 and 1390, a micro-RNA or micro-RNA precursor that shares the same target nucleotide sequence therewith, and an expression vector that encodes the same can be used as mast cell degranulation promoters. The micro-RNA of any one of SEQ ID NOs:1, 8, 21 and 36 or the micro-RNA precursor of any one of SEQ ID NOs:1337, 1352, 1372 and 1390, a micro-RNA or micro-RNA precursor that shares the same target nucleotide sequence therewith, and an expression vector that encodes the same can be used as proliferation promoters or proliferation suppressants of mesenchymal stem cells. Furthermore, the micro-RNA of any one of SEQ ID NOs:1, 3, 8, 20, 21, 22, 32 and 36 or the micro-RNA precursor of any one of SEQ ID NOs:1337, 1339, 1352, 1371, 1372, 1373, 1386 and 1390, a micro-RNA or micro-RNA precursor that shares the same target nucleotide sequence therewith, and an expression vector that encodes the same can be used as cell proliferation suppressants.

[0212] In the case of a patient affected by an abnormality of the expression of a micro-RNA or micro-RNA precursor expressed in mast cells, mesenchymal stem cells or cancer cells, by administering the micro-RNA, precursor thereof, an expression vector that encodes the same, a micro-RNA or micro-RNA precursor that shares the same target nucleotide sequence therewith, and an expression vector that encodes the same to the patient, it is possible to control a function of mast cells, mesenchymal stem cells or cancer cells to treat the above-described disease that develops as a result of an expressional abnormality. Hence, the micro-RNA or precursor thereof, an expression vector that encodes the same, a micro-RNA or micro-RNA precursor that shares the same target nucleotide sequence therewith, and an expression vector that encodes the same are useful as therapeutic agents for a disease caused by an abnormality of mast cells or mesenchymal stem cells, or a disease caused by a cell proliferation abnormality.

[0213] When the micro-RNA or a precursor thereof, and an expression vector that encodes the same are used as the above-described therapeutic agent, the micro-RNA or precursor thereof, and the expression vector that encodes the same, alone or using an appropriate vector such as a retrovirus vector, adenovirus vector, or adeno-associated viral vector, can be administered in the form of a pharmaceutical preparation prepared by the conventional method described in 11 below.

### 8. Methods of Suppressing or Promoting the Expression of a Target Gene of a Nucleic Acid, Such as a Micro-RNA, of the Present Invention

[0214] The method of suppressing the expression of a target gene of a nucleic acid, such as a micro-RNA, of the present invention, may be any method, as far as the expression of the target gene is suppressed. For example, a method can be mentioned wherein a nucleic acid, such as a micro-RNA or a micro-RNA precursor, of the present invention, is expressed or administered to increase the amount of micro-RNA in the cell, whereby the expression of an mRNA having the target sequence is suppressed to suppress the expression of the target gene. Here, a nucleic acid, such as a micro-RNA or a micro-RNA precursor, of the present invention, can be expressed by the methods described in 6 above.

[0215] The method of promoting the expression of a target gene of a nucleic acid, such as a micro-RNA, of the present invention, may be any method, as far as the expression of the target gene is promoted. For example, a method can be mentioned wherein an antisense or siRNA against a nucleic acid, such as a micro-RNA or a micro-RNA precursor, of the present invention, is expressed or administered to suppress the expression or function of the micro-RNA, micro-RNA precursor and the like, whereby the expression of the target gene is promoted. The antisense and siRNA can be prepared by the methods described in 7 above.

[0216] As examples of a target gene of a micro-RNA consisting of the nucleotide sequence of any one of SEQ ID NOs:1 to 1336, the above-described gene cluster shown in Table 2 can be mentioned.

### 9. Method of Separating Cells Using a Nucleic Acid Such as Micro-RNA and Micro-RNA Precursor of the Present Invention, and the Like

[0217] As a method of separating cells that express a nucleic acid such as the micro-RNA and micro-RNA precursor of the present invention, and the like from various cells taken out from a living organism, a probe prepared by fluorescently labeling a nucleic acid having a nucleotide sequence complementary to the nucleotide sequence of a nucleic acid such as micro-RNA, micro-RNA precursor and the like is introduced to a cell to hybridize the same to the nucleic acid such as micro-RNA, micro-RNA precursor and the like, and only the cells that have hybridized with the labeled probe are separated using a flow cytometer with a sorting function.

[0218] The fluorescently labeled probe may be any one, as far as it emits specific fluorescence upon hybridization; for example, a molecular beacon [Biochimica et Biophysica Acta 1479, 178 (1998)), FRET [Proc. Natl. Acad. Sci. USA 103, 263 (2006)] and the like can be mentioned.

[0219] A molecular beacon is a nucleic acid wherein a fluorescent functional group has been introduced via a covalent bond at one end thereof, and a dabsyl group and the like that cause fluorescence quenching has been introduced at the other end, and the nucleotide sequence thereof is designed to assume a hairpin structure in an ordinary aqueous solution. Because the fluorescent functional group and the fluorescence quenching group introduced to both ends are adjacent to each other, no fluorescence is observed with the probe alone, but if the probe is hybridized with a nucleic acid such as micro-RNA and micro-RNA precursor of the present invention, and the like, the fluorescent functional group and the fluorescence quenching group are disjoined, and intense fluorescence is observable.

[0220] FRET is the phenomenon in which molecule excitation energy transfer occurs between two kinds or more of fluorescent functional groups. Specifically, two nucleic acid probes are provided: a nucleic acid probe incorporating an energy donor at one end thereof and another nucleic acid probe incorporating an energy receptor at the other end. If the nucleotide sequences of the two probes are designed to allow the two fluorescent functional groups, introduced after hybridization with a nucleic acid such as micro-RNA, micro-RNA precursor and the like, to come into close contact with each other, only emission from the donor is observed with the probe alone, but if the probes are hybridized with a nucleic acid such as the micro-RNA and micro-RNA precursor of the present invention, and the like, the two probes come in close contact with each other, the energy of the donor transfers to the acceptor, and emission based on the acceptor is mainly observable.

[0221] As methods of cell separation using a flow cytometer with a sorting function, the water charge method, the cell capture method and the like can be mentioned (Huro Saitometa Jiyu Jizai, p 14-23, SHUJUNSHA, 1999). In both methods, cell fluorometry is performed and fluorescence intensity is converted to electrical signals to quantify fluorescence intensity, whereby cells can be separated according to the amount quantified. Specifically, fluorescence intensity can be measured using the BD FACS Aria cell sorter (manufactured by Becton Dickinson Immunocytometry Systems), EPICS ALTRA HyPerSort (manufactured by Beckman Coulter, K.K.) and the like, and the cells can be separated.

### 10. Method of Screening for a Substance That Promotes or Suppresses the Expression or Function of a Nucleic Acid Such as a Micro-RNA or Micro-RNA Precursor of the Present Invention

[0222] Using a nucleic acid, such as a micro-RNA or a micro-RNA precursor, of the present invention, a substance that promotes or suppresses the expression or function of the micro-RNA or precursor thereof can be screened for. For example, from among the nucleotide sequences of micro-RNAs and micro-RNA precursors of the present invention, a nucleotide sequence to be targeted for the screening is chosen, and by means of a cell that expresses a nucleic acid having the nucleotide sequence, a substance that promotes or suppresses the expression or function of the chosen micro-RNA or precursor thereof can be screened for.

[0223] As cells that express a nucleic acid having the nucleotide sequence of a micro-RNA or micro-RNA precursor, used for screening, mast cells, mesenchymal stem cells or cancer cells, as well as transformant cells obtained by introducing a vector that expresses a nucleic acid having the nucleotide sequence into a host cell such as an animal cell or yeast, cells incorporating a nucleic acid having the nucleotide sequence introduced directly without using a vector and the like as described in 6 above can also be used.

[0224] As specific methods of screening, (a) a method wherein a change in the expression level of a micro-RNA or precursor thereof being a target for screening is used as an index, as well as (b) a method wherein a change in the expression level of an mRNA having a target sequence of a micro-RNA or precursor thereof being a target for screening is used as an index, since a micro-RNA suppresses the translation of an mRNA having a target sequence, can be mentioned.

### (a) Screening Method Wherein a Change in the Expression Level of a Micro-RNA or Precursor Thereof Being a Target for Screening is Used as an Index

[0225] A test substance is brought into contact with a cell that expresses a nucleic acid having the nucleotide sequence, and with a change in the expression level of the nucleic acid selected as an index, a substance that promotes or suppresses the expression of a micro-RNA and precursor thereof is obtained. The expression level of a nucleic acid can be detected by the method described in 4 above.

(b) Screening Method Wherein a Change in the Expression Level of an mRNA Having a Target Sequence of a Micro-RNA or Precursor Thereof Being a Target for Screening is Used as an Index

[0226] A test substance is brought into contact with a cell that expresses a nucleic acid having the nucleotide sequence, and with a change in the expression level of an mRNA having a target sequence of the nucleic acid selected as an index, a substance that promotes or suppresses the expression or function of a micro-RNA and a precursor thereof is obtained. Alternatively, a DNA incorporating a target sequence for a single-stranded RNA having a nucleotide sequence of the present invention introduced into the 3′ UTR of an appropriate reporter gene expression vector is prepared and introduced into a host cell suitable for the expression vector, a test substance is brought into contact with the cell, and with a change in the expression level of the reporter gene as an index, a substance that promotes or suppresses the expression or function of a micro-RNA and precursor thereof is obtained.

[0227] A target sequence can be selected by the method described above; as examples of a target gene of a micro-RNA consisting of the nucleotide sequence of any one of SEQ ID NOs:1 to 1336, the above-described gene cluster shown in Table 2 can be mentioned.

### 11. Diagnostic Reagents and Therapeutic Agents Comprising a Nucleic Acid of the Present Invention and the Like

[0228] A nucleic acid, such as a micro-RNA or a micro-RNA precursor, of the present invention, and a nucleic acid having a nucleotide sequence complementary to the nucleotide sequence thereof can be utilized as a therapeutic agent for a disease caused by an abnormality of mast cells or mesenchymal stem cells and the like, or a disease caused by a cell proliferation abnormality, by controlling the expression of a target gene thereof or a nucleic acid of the present invention. A nucleic acid of the present invention can also be utilized as a diagnostic reagent for a disease caused by an abnormality of mast cells or mesenchymal stem cells and the like, or a disease caused by a cell proliferation abnormality, by quantifying, or detecting a mutation of, a nucleic acid, such as a micro-RNA or a micro-RNA, of the present invention.

[0229] As mast cell abnormalities, abnormalities of mast cell differentiation and degranulation, inflammatory mediator production, cytokine production, chemokine production and the like can be mentioned; as diseases caused thereby, atopic dermatitis, asthma, chronic obstructive lung disease, allergic disease and the like can be mentioned. As abnormalities of mesenchymal stem cells, an abnormality of proliferation or differentiation and the like can be mentioned; as diseases caused thereby, cancers, dysosteogenesis, achondroplasia, diabetes and the like can be mentioned. As diseases caused by a cell proliferation abnormality, cancers and diseases caused by abnormal proliferation of cells, tissue hyperplasia and the like, such as arteriosclerosis, rheumatoid arthritis, prostatic hyperplasia, blood vessel restenosis after percutaneous transvascular coronary angioplasty, fibroid lung, glomerulonephritis, and autoimmune diseases can be mentioned.

[0230] Referring to specific examples of therapeutic agents or diagnostic reagents, the micro-RNA of any one of SEQ ID NOs:1 to 1336 or the micro-RNA precursor of any one of SEQ ID NOs:1337 to 2851, and a nucleic acid having a nucleotide sequence complementary to the nucleotide sequence thereof can be used as a diagnostic reagent or a therapeutic agent for a disease caused by a mast cell abnormality. The micro-RNA of any one of SEQ ID NOs:1, 8, 21 and 36 or the micro-RNA precursor of any one of SEQ ID NOs:1337, 1352, 1372 and 1390, and a nucleic acid having a nucleotide sequence complementary to the nucleotide sequence thereof can be used as a diagnostic reagent or a therapeutic agent for a disease caused by an abnormality of mesenchymal stem cell proliferation and/or differentiation. Furthermore, the micro-RNA of any one of SEQ ID NOs:1, 3, 8, 20, 21, 22, 32 and 36 or the micro-RNA precursor of any one of SEQ ID NOs:1337, 1339, 1352, 1371, 1372, 1373, 1386 and 1390, and a nucleic acid having a nucleotide sequence complementary to the nucleotide sequence thereof can be used as a diagnostic reagent or a therapeutic agent for a disease caused by a cell proliferation abnormality.

[0231] A diagnostic reagent comprising a nucleic acid of the present invention, according to the desired diagnostic method, may comprise reagents necessary for quantitation or detection of a mutation of a nucleic acid such as micro-RNA and micro-RNA precursor of the present invention, and the like, for example, buffering agents, salts, reaction enzymes, labeled proteins that bind to a nucleic acid such as micro-RNA and micro-RNA precursor of the present invention, and the like, and a color developer for detection and the like.

[0232] Although a pharmaceutical containing a nucleic acid of the present invention or a nucleic acid, having a nucleotide sequence complementary to the nucleotide sequence thereof as an active ingredient can be administered alone, the same is normally desirably administered as a pharmaceutical preparation produced by an optionally chosen method known well in the technical field of pharmaceutical making with one or more pharmacologically acceptable carriers blended therein.

[0233] The route of administration used is desirably the most effective one in treatment; oral administration, or parenteral administration such as intraoral administration, airway administration, intrarectal administration, subcutaneous administration, intramuscular administration and intravenous administration can be mentioned, and desirably intravenous administration can be mentioned.

[0234] As dosage forms, sprays, capsules, tablets, granules, syrups, emulsions, suppositories, injection formulations, ointments, tapes and the like can be mentioned.

[0235] As preparations appropriate for oral administration, emulsions, syrups, capsules, tablets, powders, granules and the like can be mentioned.

[0236] Liquid preparations like emulsions and syrups can be produced using water, saccharides such as sucrose, sorbitol, and fructose, glycols such as polyethylene glycol and propylene glycol, oils such as sesame oil, olive oil, and soybean oil, antiseptics such as p-hydroxybenzoic acid esters, flavors such as strawberry flavor and peppermint and the like as additives.

[0237] Capsules, tablets, powders, granules and the like can be produced using excipients such as lactose, glucose, sucrose, and mannitol, disintegrants such as starch and sodium alginate, lubricants such as magnesium stearate and talc, binders such as polyvinyl alcohol, hydroxypropylcellulose, and gelatin, surfactants such as fatty acid esters, plasticizers such as glycerin and the like as additives.

[0238] As appropriate preparations for parenteral administration, injection formulations, suppositories, sprays and the like can be mentioned.

[0239] An injection formulation is prepared using a carrier consisting of a salt solution, a glucose solution or a mixture of both and the like. A suppository is prepared using a carrier such as cacao butter, hydrogenated fat or carboxylic acid. A spray is prepared using a carrier that does not stimulate the recipient's oral cavity and airway mucosa, and that disperses the active ingredients as fine particles to facilitate the absorption thereof, and the like.

[0240] As examples of the carrier, specifically, lactose, glycerin and the like can be exemplified. Depending on the nature of the nucleic acid of the present invention, and of the carrier used, preparations such as aerosols and dry powders are possible. In these parenteral preparations, components exemplified as additives for oral preparations can be added.

[0241] The dose or frequency of administration varies depending on desired therapeutic effect, method of administration, duration of treatment, age, body weight and the like, and is normally 10 μg/kg to 20 mg/kg per day for an adult.

[0242] A therapeutic agent comprising a nucleic acid of the present invention or a nucleic acid having a nucleotide sequence complementary to the nucleotide sequence thereof as an active ingredient can also be produced by blending a vector that expresses the nucleic acids and a base used in a nucleic acid therapeutic agent [Nature Genet., 8, 42(1994)].

[0243] The base used in the nucleic acid therapeutic agent may be any base for ordinary use in injection formulations; distilled water, solutions of salts such as sodium chloride or a mixture of sodium chloride and an inorganic salt, solutions of mannitol, lactose, dextran, and glucose, solutions of amino acids such as glycine and arginine, mixed solutions of organic acid solutions or salt solutions and glucose solution and the like can be mentioned. In accordance with a conventional method, using auxiliary agents such as an osmotic pressure regulator, a pH regulator, a vegetable oil such as sesame oil or soybean oil, lecithin, and a surfactant in these bases, an injection formulation may be prepared as a solution, suspension, or dispersion. These injection formulations can also be prepared as preparations for dissolution before use, by procedures such as powdering and lyophilization. A therapeutic agent of the present invention can be used for treatment as is in the case of a liquid, or after being dissolved in a base described above, optionally sterilized, in the case of a solid, just before treatment.

[0244] As a vector encoding a nucleic acid of the present invention, the recombinant viral vector prepared in 6 above can be mentioned, more specifically, retrovirus vector and lentivirus vector and the like can be mentioned.

[0245] For example, by combining a vector encoding a nucleic acid of the present invention with a polylysine-conjugated antibody that is specific for adenovirus hexon protein to prepare a complex, and binding the complex obtained to an adenovirus vector, a viral vector can be prepared. The viral vector is capable of stably reaching the desired cell, being incorporated into cells by endosome, being decomposed in the cells, and efficiently expressing the nucleic acid.

[0246] A viral vector based on Sendai virus, which is a (−) strand RNA virus, has been developed (WO97/16538, WO97/16539), and a Sendai virus incorporating a nucleic acid such as micro-RNA and micro-RNA precursor of the present invention and the like can be prepared using the Sendai virus.

[0247] A nucleic acid of the present invention and a vector encoding the same can also be migrated by a non-viral nucleic acid migration method. The same can be migrated by, for example, calcium phosphate co-precipitation [Virology, 52, 456-467 (1973); Science, 209, 1414-1422 (1980)], microinjection method [Proc. Natl. Acad. Sci. USA, 77, 5399-5403 (1980); Proc. Natl. Acad. Sci. USA, 77, 7380-7384 (1980); Cell, 27, 223-231 (1981); Nature, 294, 92-94 (1981)], membrane fusion-mediated migration mediated by liposome [Proc. Natl. Acad. Sci. USA, 84, 7413-7417 (1987); Biochemistry, 28, 9508-9514 (1989); J. Biol. Chem., 264, 12126-12129 (1989); Hum. Gene Ther., 3, 267-275, (1992); Science, 249, 1285-1288 (1990); Circulation, 83, 2007-2011 (1992)] or direct DNA uptake and receptor-mediated DNA migration method [Science, 247, 1465-1468 (1990); J. Biol. Chem., 266, 14338-14342 (1991); Proc. Natl. Acad. Sci. USA, 87, 3655-3659 (1991); J. Biol. Chem., 264, 16985-16987 (1989); BioTechniques, 11, 474-485 (1991); Proc. Natl. Acad. Sci. USA, 87, 3410-3414 (1990); Proc. Natl. Acad. Sci. USA, 88, 4255-4259 (1991); Proc. Natl. Acad. Sci. USA, 87, 4033-4037 (1990); Proc. Natl. Acad. Sci. USA, 88, 8850-8854 (1991); Hum. Gene Ther., 3, 147-154 (1991)] and the like.

[0248] Membrane fusion-mediated migration mediated by liposome allows a nucleic acid of the present invention and a vector encoding the same to be incorporated locally in the tissue, and to be expressed, by administering a liposome preparation directly to the target tissue [Hum. Gene Ther., 3, 399 (1992)]. For direct targeting of a DNA to a focus, direct DNA uptake technology is preferable.

[0249] For receptor-mediated DNA transfer, for example, a method performed by binding a DNA (usually assuming the form of a covalently cyclized supercoiled plasmid) to a protein ligand via polylysine can be mentioned. A ligand is chosen on the basis of the presence of a corresponding ligand receptor on the cell surface of the desired cell or tissue. The ligand-DNA conjugate can be injected directly into a blood vessel as desired, and can be directed to a target tissue wherein receptor binding and DNA-protein complex internalization occur. To prevent the destruction of the DNA in a cell, an adenovirus may be infected simultaneously to destroy the endosome function.

### 12. Methods of Measuring the Degree of Mast Cell Activation

[0250] The fact that a certain nucleic acid exhibits at least one of the actions to suppress activation, suppress degranulation, suppress inflammatory mediator production, suppress cytokine production and suppress chemokine production on mast cells can be confirmed by, for example, introducing a nucleic acid, such as a micro-RNA or a micro-RNA, of the present invention, or an antisense or siRNA against a target gene of the micro-RNA, into mast cells, and culturing the cells with the addition of IgE, thereafter activating human mast cells by the addition of an anti-IgE antibody and the like, measuring a released substance such as (i) histamine or β-hexosaminidase, which can serve as an index of degranulation, (ii) an inflammatory mediator such as LTC4, LTD4, LTE4, or PGD2, (iii) a cytokine such as TNF-α or GM-CSF, (iv) a chemokine such as IL-8, I-309, or MIP-1α, or the like, and comparing the result with that obtained when nothing is introduced. As described above, mast cell activation can also be examined by measuring, in place of degranulation, production of cytokines such as TNF-α and GM-CSF, production of chemokines such as IL-8, I-309, and MIP-la, production of inflammatory mediators such as LTC4, LTD4, LTE4, and PGD2, and the like [Blood 100, 3861(2002)].

[0251] The fact that a nucleic acid, such as a micro-RNA or a micro-RNA precursor, of the present invention, or an antisense, siRNA or the like against a target gene of the micro-RNA possess apoptosis inducing action can be detected by introducing them into mast cells, and performing a measurement of the fragmentation of chromatin DNA or a measurement by the TUNEL method and the like.

13. Methods of Proliferation, Differentiation into Osteoblasts and Evaluation of Mesenchymal Stem Cells

[0252] The method of acquiring mesenchymal stem cells is not particularly limited, as far as it ensures safe and efficient acquirement; as an example of a method of acquirement from human bone marrow, the method described in S. E. Haynesworth et al. Bone, 13, 81 (1992) can be mentioned.

[0253] In the sternal bone or iliac bone, the skin at the site for bone marrow paracentesis is disinfected, and particularly the subperiosteal region is fully anesthetized topically. The inner cylinder of the bone marrow paracentesis needle is removed, a 10-ml syringe containing 5,000 units of heparin is attached, and a necessary volume, usually 10 ml to 20 ml, of bone marrow fluid is aspirated. The bone marrow paracentesis needle is detached, and compressive hemostasis is performed for about 10 minutes. The bone marrow fluid acquired is centrifuged at 1,000×g, and bone marrow cells are recovered, thereafter the bone marrow cells are washed with phosphate buffer solution (phosphate-buffered saline) (PBS). After centrifugation and washing are repeated in 2 cycles, the bone marrow cells are suspended in a medium for cell culture such as α-MEM (α-modified MEM), DMEM (Dulbecco's modified MEM) or IMDM (Isocove's modified Dulbecco's medium), containing 10% fetal bovine serum (FBS), whereby a bone marrow cell fluid is obtained. The method of isolating mesenchymal stem cells from the bone marrow cell fluid is not particularly limited, as far as it allows the removal of other cells that are also present in the bone marrow cell fluid, for example, corpuscular cells, hematopoietic stem cells, vascular stem cells, fibroblasts and the like; for example, the method described in M. F. Pittenger et al. Science, 284, 143-147 (1999) can be mentioned. The bone marrow cell fluid is overlaid on Percoll having a density of 1.073 g/ml, and then centrifuged at 1,100×g for 30 minutes, whereby the cells at the interface can be isolated as mesenchymal stem cells. Also, an equal volume of Percoll diluted to 9/10 by the addition of a 10-fold concentration of PBS is added to, and mixed with, the bone marrow cell fluid, after which the mixture is centrifuged at 20,000×g for 30 minutes, whereby the cells in a fraction having a density of 1.075 to 1.060 can be isolated as mesenchymal stem cells.

[0254] Mesenchymal stem cells derived from human bone marrow can also be purchased from Cambrex and Takara Bio Inc.

[0255] As an example of a method of acquiring mesenchymal stem cells from the umbilical cord, the method described in Stem Cells, 21, 105-110 (2003) can be mentioned. A cannula is inserted into each end of the umbilical vein, which is washed with an appropriate buffer solution, for example, EBSS (Earle's balanced salt solution). An antibiotic is added to a 199 medium containing a protease, for example, 0.1% collagenase, and this is injected into the blood vessel, and incubated at 4 to 40° C., preferably at 37° C., for 1 to 60 minutes. The blood vessel is washed with EBSS, and the umbilical cord is gently massaged, after which a suspension of endothelial cells and subendothelial cells is recovered. The suspension is centrifuged at 600×g for 10 minutes, and the cells obtained are suspended in, for example, a medium prepared by adding 20 mM HEPES, 100 units/ml penicillin, 100 μg/ml streptomycin, 2 mM L-glutamine, 1 mM sodium pyruvate and 10% FBS to a DMEM medium containing a low concentration of glucose (DMEM-LG, Gibco). The cell density is adjusted to 10² to 10⁶ cells/cm², and the cells are inoculated to a culture flask and cultured under the conditions of 37° C. and 5% CO₂. While renewing the medium every 1 to 7 days, the cultivation is continued for 1 to 3 weeks, whereby mesenchymal stem cells can be acquired.

[0256] As an example of a method of acquiring mesenchymal stem cells from the endometrium, the method described in Am. J. Pathol., 163, 2259-2269 (2003) can be mentioned. Human endometrial tissue extirpated by surgical operation is shredded, and cultured with a medium that allows cell culture, preferably a medium prepared by adding 1 to 20% animal-derived serum, preferably 5 to 10% FBS, to α-MEM, DMEM, IMDM and the like. The medium may be supplemented with antibiotics such as penicillin and streptomycin. Furthermore, to facilitate cell separation, a collagen-decomposing enzyme such as type 3 collagenase and a DNase such as deoxyribonuclease I are added to the medium, and the medium is gently shaken at 20 to 40° C., preferably at 37° C., for 10 minutes to 5 hours, preferably for 1 hour. Each endometrial gland is separated while examining microscopically, and cultured in an appropriate culture vessel, for example, a 24-well culture dish, under the conditions of 37° C. and 5% CO₂, whereby mesenchymal stem cells can be acquired.

[0257] As an example of a method of acquiring mesenchymal stem cells from a tooth, a dental germ, or periodontal tissue, the methods described in Lancet, 364, 149-155(2004), Proc. Natl. Acad. Sci. USA, 97, 13625-13630 (2000) can be mentioned. The human tooth used may be any of deciduous teeth and permanent teeth such as incisor teeth, canine teeth, premolar teeth, and molar teeth. For example, the periodontal ligament is carefully separated from the surface of the root of a third molar (wisdom tooth) extracted, and a digestive reaction is carried out using a protease such as collagenase, trypsin, pronase, elastase, dispase, or hyaluronidase at 37° C. for 1 hour. The tissue residue is removed using a strainer, a mesh, a filter and the like, whereby mesenchymal stem cells can be acquired. Mesenchymal stem cells can also be acquired by washing the surface of an extracted third molar with PBS and the like, thereafter cutting the joint of the cement and the enamel to expose the pulp, carefully separating the dental pulp tissue from the dental crown and root, and treating the dental pulp tissue with a protease as described above, thereafter removing the tissue residue.

[0258] As methods of mesenchymal stem cell isolation other than those described above, methods can be mentioned wherein mesenchymal stem cells are isolated using a surface antigen expressed in mesenchymal stem cells or a reporter vector having a promoter and enhancer of a gene that is specific for mesenchymal stem cells. Specifically, a method of isolating stem cells using the AC133 antigen (U.S. Pat. No. 6,468,794), methods of isolating mesenchymal stem cells using a reporter vector having a promoter and enhancer of the Sox gene (US2002/0135539), the Nestin gene or the Musashi gene (JP-A-2002-034580), and the like can be mentioned.

[0259] Stem cells can also be separated using a method wherein FACS fractionation with the potential for extracellular discharge of Hoechst33342 as an index is used to concentrate stem cells in a side population (SP) [Journal of Experimental Medicine, 183, 1797-806 (1996)]. A method wherein SH2-positive, SH4-positive, CD29-positive, CD44-positive, CD71-positive, CD90-positive, CD106-positive, CD120a-positive, CD124-positive, CD14-negative, CD34-negative, and CD45-negative cells are separated as mesenchymal stem cells using a cell sorter or magnetic beads [Science, 284, 143-147 (1999)] can also be used.

[0260] As examples of media used to culture mesenchymal stem cells, the media for cell culture described in “Soshiki Baiyou No Gijyutsu, Kiso-hen, 3rd edition”, Asakura Shoten (1996) and the like can be mentioned; media for cell culture such as α-MEM, DMEM, and IMDM, supplemented with 1 to 20% of a serum such as bovine or human serum, are preferably used. Although the culture conditions may be any conditions that allow cultivation of the cells, culturing temperature is preferably 33 to 37° C., and the cultivation is preferably performed in an incubator filled with 5 to 10% gaseous CO₂. Mesenchymal stem cells are preferably proliferated in adhesion to a plastic culture dish for ordinary tissue culture. When the cells have proliferated over the entire surface of the culture dish, the medium is removed, and a trypsin-EDTA solution is added to suspend the cells. The cells suspended are washed with PBS or a medium for cell culture, after which the cells are 2 fold to 20 fold diluted with a medium for cell culture, and sown to a new culture dish, whereby further subculture can be performed.

[0261] Whether a certain nucleic acid controls the proliferation of mesenchymal stem cells can be confirmed by, for example, introducing a nucleic acid, such as a micro-RNA or a micro-RNA precursor, of the present invention, or an antisense, siRNA or the like against a target gene of the micro-RNA, into the mesenchymal stem cells, and comparing the degree of cell proliferation with that of a negative control. A method of measuring the degree of cell proliferation can be performed by the method described in 14 below.

[0262] As a method of examining the influence on the process of differentiation from mesenchymal stem cells to osteoblasts, for example, confirmation is made as described below. Specifically, under conditions that induce differentiation from mesenchymal stem cells to osteoblasts, a nucleic acid, micro-RNA or micro-RNA precursor of the present invention, or an antisense, siRNA or the like against a target gene of the micro-RNA, is introduced into the mesenchymal stem cells, and the cells are cultured. Genes or proteins whose expression increased with the progression of differentiation into osteoblasts are analyzed, and compared with negative control.

[0263] As a method of inducing differentiation from mesenchymal stem cells to osteoblasts, any method can be used, as far as it enables induction of differentiation from mesenchymal stem cells to osteoblasts; for example, a method described in Science, 284, 143-147 (1999) can be mentioned. Specifically, by sowing mesenchymal stem cells to an incubator, and thereafter continuing to culture the cells in a medium for cell culture containing dexamethasone, ascorbic acid-diphosphate, and β-glycerophosphate for 1 to 4 weeks, mesenchymal stem cells can be differentiated into osteoblasts.

[0264] As quantitative analytical methods for genes whose expression increases as a result of differentiation into osteoblasts, analysis by RT-PCR (reverse transcription-polymerase chain reaction), Northern blot analysis, dot blot hybridization, DNA microarray and the like can be mentioned.

[0265] As quantitative analytical methods for proteins whose expression increases as a result of differentiation into osteoblasts, Western blot analysis, immunohistological staining, ELISA and the like using an antibody that specifically reacts on the protein can be mentioned.

[0266] As genes or proteins whose expression increases as a result of differentiation into osteoblasts, type I collagen, osteocalcin, osteonectin, osteopontin, bone sialoprotein, Runx2 (runt-related gene 2), alkaline phosphatase (ALP) and the like can be mentioned.

[0267] As methods of evaluating the degree of differentiation into osteoblasts, staining cells by means of the ALP enzyme activity in the osteoblasts, and a method wherein ALP enzyme activity is measured can be mentioned. More specifically, as a method of such cell staining, a method can be mentioned wherein the alcohol moiety of the phosphoric acid ester of the substrate hydrolyzed by ALP enzyme in osteoblasts is coupled with a diazonium salt, and precipitated with azo dye in the enzyme activity portion. As an example of the substrate, Naphthol AS-MX phosphate can be mentioned; as an example of the azo dye, Fast Violet Blue can be mentioned. A kit comprising the same, for example, leukocyte alkaline phosphatase (manufactured by Sigma) and the like may be used. As kits for measuring ALP enzyme activity, for example, Alkaline Phospha B-Test Wako (manufactured by Wako Pure Chemical Industries, Ltd.) and the like may be used.

[0268] Furthermore, by detecting a calcified component produced by osteoblasts, differentiation into osteoblasts can also be confirmed. As methods of detecting a calcified component, staining methods such as von Kossa staining and Alizarin Red staining can be mentioned.

[0269] Von Kossa staining is a method of detecting calcium phosphate, a calcified component, using silver nitrate. Specifically, a 1 to 5% aqueous solution of silver nitrate is reacted with cells fixed with paraffin and the like and exposed to light, and the portion that develops a black color in which calcium phosphate is present is quantified by, for example, measuring the area where the color is developed, whereby the degree of differentiation into osteoblasts can be evaluated.

[0270] Alizarin Red staining is a method based on the fact that Alizarin Red S exhibits specific binding to calcium to form a lake. Specifically, 0.01 to 5% Alizarin Red S solution is reacted with cells fixed with paraffin and the like, and the portion that develops a red-purple to orange-red color is quantified by, for example, measuring the area where the color is developed, whereby the degree of differentiation into osteoblasts can be evaluated.

### 14. Method of Measuring Proliferation of Cancer Cells and Other Cells

[0271] The method of measuring cell proliferation is not particularly limited, as far as it enables a measurement of an index that reflects cell count or cell proliferation rate. Viable cell counting, DNA synthesis rate measurements, total protein content measurements and the like can be used.

[0272] As a method of evaluating viable cell counts, a method wherein the ATP content in cells is measured can be mentioned. It is known that the ATP content in cells is proportional to the number of cells in culture (J. Immunol. Meth. 160, 81-88 (1993)). As more specific methods of measuring the ATP content in cells, the MTT method, the XTT method and the like can be mentioned (J. Immunol. Meth. 65, 55-63 (1983)). A method can also be mentioned wherein ATP content is measured by luminescence of a luciferin substrate by the ATP-dependent enzyme luciferase. As a kit for measuring the ATP content in cells, for example, Cell Titer-Glo® Luminescent Cell viability Assay (manufactured by Promega) and the like may be used.

### 15. Methods of Measuring the Degree of Cell Death of Cancer Cells and Other Cells

[0273] As methods of measuring the degree of cell death, a method wherein dead cells are stained with a dye such as Propium Iodide, a method wherein the activity of an enzyme leaked extracellularly as a result of cell death is measured, and the like can be used. For the latter, for example, a method wherein the enzyme activity of extracellularly leaked adenylate kinase is measured can be utilized. More specifically, ToxiLight® Non-Destructive Cytotoxicity BioAssay Kit (manufactured by Lonza) and the like may be used.

[0274] It is also possible to measure the degree exclusively of apoptosis (programmed cell death), which is important in relation to cancers, out of the various types of cell death. As methods of evaluating cell apoptosis, a method wherein the degree of DNA fragmentation is measured, a method wherein changes in cell membrane constituent lipids are measured, and a method wherein the activity of caspase 3/7, an intracellular protease induced upon apoptosis, is measured, can be mentioned. As a more specific method of measuring caspase 3/7 activity in cells, a method wherein a luciferin substrate liberated by caspase 3/7 activity is measured by luciferin luminescence by a luciferase enzyme reaction can be mentioned. As kits for measuring caspase 3/7 activity in cells, for example, Caspase-Glo® 3/7 Assay (manufactured by Promega) and the like may be used.

[0275] Hereinafter, the present invention is described specifically by means of the following examples.

### Example 1

### Extraction of Micro-RNAs Expressed in Human Mast Cells

### (1) RNA Extraction

[0276] LAD2 is a recently established human mast cell line, and is known to well retain the nature of human mast cells [Leuk. Res., 27, 671 (2003); Leuk. Res., 27, 677 (2003)]. Hence, extraction of micro-RNAs from LAD2 was performed. LAD2 was obtained from the National Institute of Allergy and Infectious Diseases, National Institutes of Health (Bethesda, Md. 20892-1881, USA), and cultured with a Stem Pro-34 medium [manufactured by Invitrogen] containing 100 ng/mL SCF in a 37° C. 5% CO₂ concentration incubator.

### (2) Cloning of Low-Molecular RNAs

[0277] Using 200 μg of the LAD2-derived total RNA acquired in (1) above, and according to the method of Lau et al. (Science 294, 858-862, 2001), excision for low-molecular RNAs by means of 15% polyacrylamide gel electrophoresis, 5′-adenylated 3′-adapter ligation, 5′-adapter ligation, reverse transcription, PCR amplification, concatemerization, and ligation to the pCR2.1-TOPO vector were performed sequentially, to achieve cloning of the low-molecular RNAs. Next, the nucleotide sequences of the low-molecular RNAs cloned were determined. The 5′-adenylated 3′-adapter used was miRNA Cloning Linker, manufactured by Integrated DNA Technologies.

[0278] Separately from the above-described method, the nucleotide sequence was also determined by performing separation and cutting out of a low-molecular RNA by 15% polyacrylamide gel electrophoresis, 5′ terminal dephosphorylation, 3′-adapter ligation, phosphorylation, 5′-adapter ligation, reverse transcription, PCR amplification, and ligation to a microbead vector sequentially to achieve cloning of the low-molecular RNA, and reading the nucleotide sequence of the microbead, using 200 μg of the LAD2-derived total RNA acquired in (1) above, according to the method of Mineno et al. [Nucleic Acids Research, 34, 1765-1771, (2006)].

### Example 2

### Identification of Micro-RNAs

[0279] From among the low-molecular RNAs obtained in Example 1, first, those whose nucleotide sequences did not agree with any one in miRBase (http://microrna.sanger.ac.uk/), which is a database for known micro-RNAs, were selected. Surrounding genome sequences wherein DNA sequences corresponding to those nucleotide sequences were extended by about 50 nt toward the 5′ side and the 3′ side, respectively, were acquired from UCSC Genome Bioinformatics (http://genome.ucsc.edu/), and the secondary structures of the RNAs expected to be transcribed from the genome sequences were predicted using RNAfold. As a result, 1336 types were found to be novel micro-RNAs located in one chain of the hairpin structure. The nucleotide sequences thereof and the nucleotide sequences of micro-RNA precursors comprising these micro-RNAs are shown in Tables 1. The micro-RNAs having the respective nucleotide sequences were given the names KHK miR 1001 to 2344 (Table 1). If one micro-RNA can assume hairpin structures derived from genome sequences at different positions, all thereof are shown.

[0280] As an example secondary structure, the hairpin structure of KHK_miR_{—}1194 is shown in FIG. 1.

### Example 3

### Detection of Functions of Micro-RNAs

[0281] By determining whether or not a micro-RNA obtained in Example 2 undergoes processing by Dicer protein, whether or not the same functions as a micro-RNA can be determined.

[0282] Of the micro-RNAs obtained in Example 2, the micro-RNA of KHK_miR_{—}1194 can have a function thereof detected as described below. First, a single-stranded RNA having the nucleotide sequence of SEQ ID NO:1580 is synthesized, and reacted with the Dicer Enzyme attached to the X-treme GENE siRNA Dicer Kit (manufactured by Roche-Applied Science). Next, the reaction product is electrophoresed with 15% polyacrylamide gel; detection of a band 20 to 25 nucleotides in size indicates that the possession of a function as a micro-RNA.

### Example 4

[0283] Action on Degranulation of Human Mast Cells with Micro-RNA Expressed Forcibly Therein

[0284] Each micro-RNA precursor obtained in Example 2 was introduced to LAD2, a human mast cell line, to induce degranulation, and the influence of the micro-RNA precursor was examined.

[0285] The LAD2 was cultured with a Stem Pro-34 medium (manufactured by Invitrogen) containing 100 ng/mL SCF.

[0286] The LAD2 was sown to a 6-well plate at about 5×10⁵ cells per well, and a micro-RNA precursor was introduced using a lipofection method, specifically, Gene Silencer (manufactured by Genlantis), to obtain a final concentration of 30 nM. The micro-RNA (hereinafter also referred to as miRNA) precursors used were KHK_miR_{—}1001, 1002, 1003, 1008, 1014, 1020, 1021, 1022, 1025, 1032, and 1036, synthesized as Pre-miR™ miRNA Precursor Molecules by Ambion. These were chemically synthesized double-stranded nucleic acid molecules, designed to allow nucleic acids consisting of the nucleotide sequences of SEQ ID NOs:1, 2, 3, 8, 14, 20, 21, 22, 25, 32, and 36, respectively, to be incorporated by a complex similar to RISC, which is a factor for the activity of an miRNA, to exhibit the same function as the miRNA. For a sequence corresponding to the human genome sequence of SEQ ID NO:1, a nucleic acid consisting of a sequence having 1 nucleotide on the 5′ side and 4 nucleotides on the 3′ side deleted from SEQ ID NO:1 (SEQ ID NO:2852) was provided, and KHK_miR_{—}1001_{—}2, synthesized as Pre-miR™ miRNA Precursor Molecule by Ambion, was also used. For negative control, Pre-miR™ miRNA Precursor Molecules-Negative Control #2 (hereinafter referred to as miR-negacon #2) (manufactured by Ambion) was introduced into the LAD2 in the same manner. Lipofection was performed per the directions attached to the product.

[0287] Two days after introduction of the micro-RNA precursor by a lipofection method, 1 μg/mL human myeloma IgE (manufactured by Cosmo Bio Co., Ltd.) was added, and the cells were cultured in a 37° C. 5% CO₂ concentration incubator overnight. On the day that followed, the medium was removed via centrifugation, and the plate was washed with a Tyrode buffer solution (126.1 mmol/L NaCl, 4.0 mmol/L KCl, 1.0 mmol/L CaCl₂, 0.6 mmol/L MgCl₂, 0.6 mmol/L KH₂PO₄, 10 mM HEPES, 5.6 mmol/L D-glucose, 0.1% bovine serum albumin, pH 7.4), after which 3.9 mL of the Tyrode buffer solution was added to suspend the cells, and the suspension was dispensed to a 96-well plate at 100 μL per well. Next, a rabbit anti-human IgE antibody (manufactured by DAKO) was added to obtain a final concentration of 10 μg/mL, and this was followed by incubation in a 37° C. 5% CO₂ concentration incubator for 20 minutes to induce degranulation. The supernatant was recovered via centrifugation, and the β-hexosaminidase activity in the supernatant was measured, whereby the degree of degranulation was determined. The β-hexosaminidase activity was measured by adding 50 μL of 4 mmol/L p-nitrophenyl N-acetyl-β-glucosaminide (manufactured by Sigma) dissolved in 40 mmol/L citrate buffer solution (pH 4.5) to 50 μL of the supernatant recovered, and incubating the mixture at 37° C. for 1 hour, thereafter adding 100 μL of 0.2 mol/L glycine (pH 10.7), and measuring the absorbance of the sample at 405 nm using the plate reader 1420 ARVOsx (manufactured by Perkin Elmer). Also, by performing the same experiment but with the addition of Triton X-100 at a final concentration of 1% in place of the rabbit anti-human IgE antibody, the total β-hexosaminidase activity in LAD2 was measured. The ratio of degranulation was calculated as the ratio (%) of the β-hexosaminidase activity in the supernatant relative to total β-hexosaminidase activity; taking the degranulation ratio of a control plot (Gene Silencer only) as 1.0, the relative degranulation activity of each was calculated. The results are shown in Table 3.

TABLE 3

| introduced micro-RNA | relative degranulation |
|---|---|
| precursor | activity |
| KHK_miR_1001 | 1.34 |
| KHK_miR_1001_2 | 1.25 |
| KHK_miR_1002 | 1.80 |
| KHK_miR_1003 | 1.42 |
| KHK_miR_1008 | 1.33 |
| KHK_miR_1014 | 1.38 |
| KHK_miR_1020 | 1.31 |
| KHK_miR_1022 | 1.25 |
| KHK_miR_1025 | 1.24 |
| KHK_miR_1032 | 1.53 |
| KHK_miR_1036 | 1.43 |
| miR-negacon#2 | 1.01 |

[0288] As a result, it was found that with introduction of KHK_miR_{—}1001, 1001_{—}2, 1002, 1003, 1008, 1014, 1020, 1022, 1025, 1032, or 1036, the degranulation of LAD2 stimulated by IgE receptor is promoted.

### Example 5

[0289] Proliferation Activity, Osteoblast Differentiation, and Viable Cell Count of Mesenchymal Stem Cells with Micro-RNAs Expressed Forcibly Therein

[0290] Each micro-RNA precursor obtained in Example 2 was introduced into human mesenchymal stem cells (hereinafter also referred to as hMSCs), and the effects of the micro-RNA precursors on the proliferation and osteoblast differentiation were examined.

[0291] The human mesenchymal stem cells were obtained from Cambrex, and cultured with an IMDM medium (manufactured by Invitrogen) containing 20% fetal bovine serum (FBS) (manufactured by JRH Bioscience) in a 37° C. 5% CO₂ concentration incubator. The hMSCs were sown to a 24-well plate at about 6.2×10³ cells per well, and cultured with the IMDM medium containing 20% FBS overnight. One day later, the micro-RNA precursor was introduced into the hMSCs using a lipofection method, specifically, Lipofectamine 2000 (manufactured by Invitrogen), to obtain a final concentration of 20 nM. The micro-RNA precursors used were KHK_miR_{—}1001, 1001_{—}2, 1002, 1003, 1008, 1014, 1020, 1021, 1022, 1025, 1032, and 1036, synthesized as Pre-miR™ miRNA Precursor Molecules by Ambion. Lipofection was performed per the directions attached to the product.

[0292] On the day after introduction of the micro-RNA precursor by the lipofection method, the medium was replaced with an osteoblast differentiation induction medium [an IMDM medium containing 20% FBS, supplemented with 0.1 μmol/L dexamethasone, 50 μmol/L ascorbic acid-diphosphoric acid (manufactured by Sigma), and 10 mmol/L β-glycerophosphite (manufactured by Sigma)], and cultivation was continued with renewal of the osteoblast differentiation induction medium at a frequency of once per 3 days.

[0293] Two weeks after the start of the cultivation, cell morphology was examined under a phase-contrast microscope (manufactured by Nikon), and alkaline phosphatase staining was performed, to detect osteoblasts. Specifically, first, the cells were once washed with phosphate buffer solution (hereinafter also referred to as PBS (phosphate-buffered saline)) (manufactured by Invitrogen), and fixed with a fixative solution (10% formalin/PBS) for 5 minutes. The cells were washed with distilled water, and thereafter reacted with a mixed solution of Naphthol AS-MX phosphate (manufactured by Sigma) and Fast Violet B solution (manufactured by Sigma) in the dark for 30 minutes to cause an alkaline phosphatase reaction. Furthermore, the cells were washed with distilled water, and osteoblasts stained red were examined under a phase contrast microscope and photographed using a digital camera (manufactured by Nikon).

[0294] As a result, it was found that the hMSCs incorporating Pre-miR™ miRNA Precursor Molecules of KHK_miR_{—}1008, 1021, or 1036 had fewer cells than the hMSCs not incorporating any micro-RNA precursor, and also had fewer positive cells stained with alkaline phosphatase. Micro-RNA precursors are converted to micro-RNAs in cells; hence, it was found that the micro-RNAs derived from these precursors exhibit a suppressive activity on the proliferation of hMSCs and suppressive activity on the differentiation thereof into osteoblasts. Conversely, it was found that the hMSCs incorporating Pre-miR™ miRNA Precursor Molecules of KHK_miR_{—}1001 or 1001_{—}2 had a larger number of positive cells stained with alkaline phosphatase than the hMSCs not incorporating any micro-RNA precursor. From this, it was found that the micro-RNAs derived from these precursors exhibit a promotive activity on the differentiation of hMSCs into osteoblasts.

[0295] Four days after introduction of each micro-RNA precursor by the lipofection method, viable cell ratios were measured using CellTiter-Glo™ Luminescent Cell Viability Assay (manufactured by Promega). The results are shown in Table 4. As shown in Table 4, it was found that with introduction of KHK_miR_{—}1001, the viable cell ratio increased than usual.

TABLE 4

| introduced micro-RNA precursor | viable cell ratio |
|---|---|
| KHK_miR_1001 | 1.28 |
| miR_negacon#2 | 1.00 |

### Example 6

[0296] Viable Cell Ratio and Apoptotic Activity in Colon Cancer-Derived Cell Line with Micro-RNA Expressed Forcibly Therein

[0297] Each micro-RNA precursor obtained in Example 2 was introduced to a colon cancer-derived cell line, and the effects of the micro-RNA precursor on viable cell ratio and apoptotic activity were examined.

[0298] The DLD-1 human colorectal cancer-derived cell line (hereinafter to be sometimes referred to as DLD-1) was obtained from the American Type Culture Collection (ATCC) (hereinafter referred to as ATCC) (ATCC CCL-221). DLD-1 was cultured with an RPMI1640 medium (manufactured by Invitrogen) containing 10% fetal bovine serum (FBS) (manufactured by JRH Biosciences) in a 37° C. 5% CO₂ concentration incubator.

[0299] DLD-1 was sown to a 96-well plate at about 2500 cells per well, and cultured in an RPMI medium containing 10% FBS overnight. After 1 day, a micro-RNA precursor was introduced to the DLD-1 using a lipofection method, specifically Lipofectamine 2000 (manufactured by Invitrogen), to obtain a final concentration of 5 nM or 25 nM. The micro-RNA precursors used were KHK_miR_{—}1001, 1001_{—}2, 1002, 1003, 1008, 1014, 1020, 1021, 1022, 1025, 1032, and 1036, synthesized as Pre-miR™ miRNA Precursor Molecules by Ambion. In addition, miR-negacon #2 (manufactured by Ambion) was also introduced to DLD-1, and this was used as the negative control. Lipofection was performed per the directions attached to the product.

[0300] Three days after introduction of the micro-RNA precursor by a lipofection method, viable cell ratios were measured using CellTiter-Glo™ Luminescent Cell Viability Assay (manufactured by Promega). Taking the viable cell ratio of DLD-1 in a control plot (Lipofectamine 2000 only) as 1.0, the relative viable cell ratio of each was calculated. As a result, as shown in Table 5, with introduction of KHK_miR_{—}1001, 1001_{—}2, 1032, or 1036, a decrease of 40% or more in viable cell ratio was observed.

TABLE 5

| introduced micro- | viable cell ratio | viable cell ratio |
|---|---|---|
| RNA precursor | (5 nM) | (25 nM) |
| KHK_miR_1001 | 0.23 | 0.11 |
| KHK_miR_1001_2 | 0.32 | 0.19 |
| KHK_miR_1032 | 0.58 | 0.59 |
| KHK_miR_1036 | 0.70 | 0.46 |
| miR_negacon#2 | 0.87 | 0.87 |

[0301] Two days after introduction of the micro-RNA precursor by a lipofection method, caspase 3/7 activity was measured using Caspase-Glo® 3/7 assay (manufactured by Promega) per the directions attached to the product. Taking the caspase 3/7 activity value of DLD-1 in a control plot (Lipofectamine 2000 only) as 1.0, the relative caspase 3/7 activity value of each was calculated. The results are shown in Table 6. As shown in Table 6, with introduction of KHK_miR_{—}1001, 1001_{—}2, or 1036, an increase of 50% or more in caspase 3/7 activity was observed.

TABLE 6

| introduced micro-RNA precursor | caspase 3/7 activity |
|---|---|
| KHK_miR_1036 | 2.50 |
| KHK_miR_1001 | 2.07 |
| KHK_miR_1001_2 | 1.84 |
| miR_negacon#2 | 0.85 |

### Example 7

[0302] Viable Cell Ratio in Ovarian Cancer-Derived Cell Line with Micro-RNA Expressed Forcibly Therein

[0303] Each micro-RNA precursor obtained in Example 2 was introduced to an ovarian cancer-derived cell line, and the effects of the micro-RNA precursor on viable cell ratio was examined.

[0304] The A2780 human ovarian cancer-derived cell line (Nature, 295, 116-119 (1982); Science, 224, 994-996 (1984); Semin. Oncol., 11, 285-298 (1984); hereinafter to be referred to as A2780) was cultured with an RPMI1640 medium (manufactured by Invitrogen) containing 5% FBS (manufactured by JRH Biosciences) in a 37° C. 5% CO₂ concentration incubator.

[0305] A2780 was sown to a 96-well plate at about 2500 cells per well, and cultured with an RPMI medium containing 10% FBS overnight. After 1 day, the micro-RNA precursor was introduced to A2780 using a lipofection method, specifically Lipofectamine 2000 (manufactured by Invitrogen), to obtain a final concentration of 5 nM or 25 nM. The micro-RNA precursors used were KHK_miR_{—}1001, 1001_{—}2, 1002, 1003, 1008, 1014, 1020, 1021, 1022, 1025, 1032, and 1036, synthesized as Pre-miR™ miRNA Precursor Molecules by Ambion. miR-negacon #2 (manufactured by Ambion) was also introduced into A2780, and this was used for negative control.

[0306] Three days after introduction of the micro-RNA precursor by a lipofection method, viable cell ratios were measured using CellTiter-Glo™ Luminescent Cell Viability Assay (manufactured by Promega). Taking the viable cell ratio of A2780 in a control plot (Lipofectamine 2000 only) as 1.0, the relative viable cell ratio of each was calculated. The results are shown in Table 7. As shown in Table 7, with introduction of KHK_miR_{—}1003, 1008, 1020, 1021, 1022, 1032, or 1036, a decrease of 40% or more in viable cell ratio was observed.

TABLE 7

| introduced micro- | viable cell ratio | viable cell ratio |
|---|---|---|
| RNA precursor | (5 nM) | (25 nM) |
| KHK_miR_1032 | 0.36 | 0.43 |
| KHK_miR_1003 | 0.41 | 0.45 |
| KHK_miR_1008 | 0.43 | 0.43 |
| KHK_miR_1036 | 0.44 | 0.36 |
| KHK_miR_1021 | 0.46 | 0.64 |
| KHK_miR_1020 | 0.48 | 0.57 |
| KHK_miR_1022 | 0.52 | 0.52 |
| miR_negacon#2 | 1.00 | 1.05 |

### INDUSTRIAL APPLICABILITY

[0307] The present invention provides a nucleic acid such as a micro-RNA or a micro-RNA precursor, having a novel sequence. The nucleic acid of the present invention makes it possible to detect the expression or a mutation of a micro-RNA, to separate cells, to suppress the expression of a target sequence gene, to screen for a substance that promotes or suppresses a function of a micro-RNA, and to diagnose or treat a disease caused by a mast cell abnormality, a disease caused by an abnormality of mesenchymal stem cell proliferation or differentiation, cancers, and a disease caused by abnormal proliferation of cells, tissue hyperplasia or the like.

The application's sequence listing, which the Patent Office published only in electronic form, follows.

SEQUENCE LISTING (2852 sequences)

SEQ ID NO: 1 - RNA, 28 nt, Homo sapiens
ccccccacaaccgcgcuugacuagcuug

SEQ ID NO: 2 - RNA, 19 nt, Homo sapiens
gugaggggccagauggcaa

SEQ ID NO: 3 - RNA, 21 nt, Homo sapiens
uccccccaaaauucauaaugu

SEQ ID NO: 4 - RNA, 18 nt, Homo sapiens
gcaggugagguugugacg

SEQ ID NO: 5 - RNA, 17 nt, Homo sapiens
gcagcugagccaagaag

SEQ ID NO: 6 - RNA, 17 nt, Homo sapiens
uauauguguaauaagac

SEQ ID NO: 7 - RNA, 24 nt, Homo sapiens
ugggcugaagugauucuccugccu

SEQ ID NO: 8 - RNA, 19 nt, Homo sapiens
ugccugugcucugcggucu

SEQ ID NO: 9 - RNA, 18 nt, Homo sapiens
gcggagccggagcccgag

SEQ ID NO: 10 - RNA, 18 nt, Homo sapiens
cccgacggggagccaaga

SEQ ID NO: 11 - RNA, 23 nt, Homo sapiens
aaaaaccgccauuacuuuugcac

SEQ ID NO: 12 - RNA, 17 nt, Homo sapiens
agggcucagagagaagg

SEQ ID NO: 13 - RNA, 18 nt, Homo sapiens
aggccaucuucagcaagg

SEQ ID NO: 14 - RNA, 22 nt, Homo sapiens
auauaauacaaccugcuaagug

SEQ ID NO: 15 - RNA, 15 nt, Homo sapiens
cggagagggagccug

SEQ ID NO: 16 - RNA, 15 nt, Homo sapiens
gaggaaugaugacaa

SEQ ID NO: 17 - RNA, 18 nt, Homo sapiens
cagcggcaccagagagag

SEQ ID NO: 18 - RNA, 18 nt, Homo sapiens
gcggcaagcuggugucug

SEQ ID NO: 19 - RNA, 20 nt, Homo sapiens
cuuccagacgcuccgcccca

SEQ ID NO: 20 - RNA, 21 nt, Homo sapiens
ugaguguacugugggcuucgg

SEQ ID NO: 21 - RNA, 24 nt, Homo sapiens
uugcagcugccugggagugacuuc

SEQ ID NO: 22 - RNA, 19 nt, Homo sapiens
ucuccccaagcuccagcgg

SEQ ID NO: 23 - RNA, 18 nt, Homo sapiens
agguuucuaaugagacaa

SEQ ID NO: 24 - RNA, 17 nt, Homo sapiens
ggcgggggcggcgcgcg

SEQ ID NO: 25 - RNA, 24 nt, Homo sapiens
gacccgcgggcgcucuccaguccu

SEQ ID NO: 26 - RNA, 18 nt, Homo sapiens
aucccuucgugguugcca

SEQ ID NO: 27 - RNA, 22 nt, Homo sapiens
cacccggcugugugcacaugug

SEQ ID NO: 28 - RNA, 22 nt, Homo sapiens
acucggcguggcgucggucgug

SEQ ID NO: 29 - RNA, 21 nt, Homo sapiens
cugauguucgccgaccguuga

SEQ ID NO: 30 - RNA, 22 nt, Homo sapiens
aggagggcugagagggccccug

SEQ ID NO: 31 - RNA, 22 nt, Homo sapiens
uugcagcugccugggagugacu

SEQ ID NO: 32 - RNA, 22 nt, Homo sapiens
cgcuugacuagcuugcuguuuu

SEQ ID NO: 33 - RNA, 22 nt, Homo sapiens
agcucugcugcucacuggcagu

SEQ ID NO: 34 - RNA, 22 nt, Homo sapiens
gcagcugaugauacagcuucuu

SEQ ID NO: 35 - RNA, 22 nt, Homo sapiens
uccagcagggcacgcacagcgu

SEQ ID NO: 36 - RNA, 22 nt, Homo sapiens
ccaguuaccgcuuccgcuaccg

SEQ ID NO: 37 - RNA, 21 nt, Homo sapiens
auuggccaguuuugucugaug

SEQ ID NO: 38 - RNA, 21 nt, Homo sapiens
uaugugccuaguggcugcugu

SEQ ID NO: 39 - RNA, 22 nt, Homo sapiens
ucucucggcuccucgcggcucg

SEQ ID NO: 40 - RNA, 22 nt, Homo sapiens
ccuccugaugauucuucuuccu

SEQ ID NO: 41 - RNA, 22 nt, Homo sapiens
uguccuugcuguuuggagauaa

SEQ ID NO: 42 - RNA, 22 nt, Homo sapiens
accgucguucucaucggaacug

SEQ ID NO: 43 - RNA, 22 nt, Homo sapiens
auccccagauacaauggacaau

SEQ ID NO: 44 - RNA, 22 nt, Homo sapiens
cuuccagacgcuccgccccacg

SEQ ID NO: 45 - RNA, 22 nt, Homo sapiens
ugacagcgcccugccuggcucg

SEQ ID NO: 46 - RNA, 22 nt, Homo sapiens
ugccccaacaaggaaggacaag

SEQ ID NO: 47 - RNA, 22 nt, Homo sapiens
uauggaggucucugucuggcuu

SEQ ID NO: 48 - RNA, 21 nt, Homo sapiens
ccaaaacugcaguuacuuuug

SEQ ID NO: 49 - RNA, 16 nt, Homo sapiens
cggcggggcgcgggac

SEQ ID NO: 50 - RNA, 22 nt, Homo sapiens
uucucacuacugcacuugauag

SEQ ID NO: 51 - RNA, 21 nt, Homo sapiens
aaugaaucugaggaggcuacu

SEQ ID NO: 52 - RNA, 20 nt, Homo sapiens
aagccaguuucugucugaua

SEQ ID NO: 53 - RNA, 22 nt, Homo sapiens
ccgcuaccggcgcgacaggccg

SEQ ID NO: 54 - RNA, 22 nt, Homo sapiens
cuaaagagaagucaaugcauga

SEQ ID NO: 55 - RNA, 22 nt, Homo sapiens
ugucuuuccuuguuggagcagg

SEQ ID NO: 56 - RNA, 21 nt, Homo sapiens
aaucucugucucuuggaccug

SEQ ID NO: 57 - RNA, 21 nt, Homo sapiens
agaaguaauugcgguuuugcc

SEQ ID NO: 58 - RNA, 16 nt, Homo sapiens
ugggggcggggagcgg

SEQ ID NO: 59 - RNA, 22 nt, Homo sapiens
aaucuaccuugcaguguaggaa

SEQ ID NO: 60 - RNA, 22 nt, Homo sapiens
cucggugccggaagcggccgug

SEQ ID NO: 61 - RNA, 22 nt, Homo sapiens
ucaaggcccugcugggagggaa

SEQ ID NO: 62 - RNA, 21 nt, Homo sapiens
cagacgcucaggaaauagaaa

SEQ ID NO: 63 - RNA, 20 nt, Homo sapiens
cgccgcuuucugggcucgcu

SEQ ID NO: 64 - RNA, 20 nt, Homo sapiens
gaugcagcucccuggggaca

SEQ ID NO: 65 - RNA, 20 nt, Homo sapiens
uuugcaguaacaggugugag

SEQ ID NO: 66 - RNA, 22 nt, Homo sapiens
aauagcucagaaugucaguucu

SEQ ID NO: 67 - RNA, 22 nt, Homo sapiens
auguauuccgcuucugaacagg

SEQ ID NO: 68 - RNA, 22 nt, Homo sapiens
ccacuccugaccagcaggaaug

SEQ ID NO: 69 - RNA, 22 nt, Homo sapiens
ccuuugcaacacugagcaacug

SEQ ID NO: 70 - RNA, 22 nt, Homo sapiens
cucugcaggaauaacgguccug

SEQ ID NO: 71 - RNA, 22 nt, Homo sapiens
cugguucugccagcuccccuga

SEQ ID NO: 72 - RNA, 22 nt, Homo sapiens
cuguuuguuggagcccuccagg

SEQ ID NO: 73 - RNA, 22 nt, Homo sapiens
cuuguaaagcauaguguuugcu

SEQ ID NO: 74 - RNA, 22 nt, Homo sapiens
guggggcuggggcacccuccga

SEQ ID NO: 75 - RNA, 22 nt, Homo sapiens
ucauaaauucuuugccaagacu

SEQ ID NO: 76 - RNA, 22 nt, Homo sapiens
ugcugcagugcucugagcccua

SEQ ID NO: 77 - RNA, 22 nt, Homo sapiens
uggucuguggacuucccaugcu

SEQ ID NO: 78 - RNA, 22 nt, Homo sapiens
uugcaagugagggugaagaaga

SEQ ID NO: 79 - RNA, 22 nt, Homo sapiens
uugggacagggucuugcugugu

SEQ ID NO: 80 - RNA, 22 nt, Homo sapiens
uuucucauuuaccucccuggaa

SEQ ID NO: 81 - RNA, 22 nt, Homo sapiens
uuugugucuugguuggcgucuu

SEQ ID NO: 82 - RNA, 22 nt, Homo sapiens
uuuugcgaguacucaacaccaa

SEQ ID NO: 83 - RNA, 21 nt, Homo sapiens
aaaaaguaauugcuguuuuug

SEQ ID NO: 84 - RNA, 21 nt, Homo sapiens
agacuucauuccucuaugucu

SEQ ID NO: 85 - RNA, 21 nt, Homo sapiens
agcgccuggugcgagaaaucg

SEQ ID NO: 86 - RNA, 21 nt, Homo sapiens
cggcuggagggcuccucucug

SEQ ID NO: 87 - RNA, 21 nt, Homo sapiens
gcgcccgcccgcccgcccgcc

SEQ ID NO: 88 - RNA, 21 nt, Homo sapiens
uucucggccuauccggaaugc

SEQ ID NO: 89 - RNA, 21 nt, Homo sapiens
uugcugggaaagggagaaguu

SEQ ID NO: 90 - RNA, 20 nt, Homo sapiens
aacuggaguguacccaaaac

SEQ ID NO: 91 - RNA, 20 nt, Homo sapiens
aacuguggacagauucucaa

SEQ ID NO: 92 - RNA, 20 nt, Homo sapiens
ggugcuguugcugaaacgcu

SEQ ID NO: 93 - RNA, 20 nt, Homo sapiens
ucucagccuggagucagggc

SEQ ID NO: 94 - RNA, 20 nt, Homo sapiens
ucuuuucuuugagacucacu

SEQ ID NO: 95 - RNA, 20 nt, Homo sapiens
uggggacguagcuggccaga

SEQ ID NO: 96 - RNA, 20 nt, Homo sapiens
uuacuucagggaguggcaga

SEQ ID NO: 97 - RNA, 20 nt, Homo sapiens
uugccuuaggcuucuuucuu

SEQ ID NO: 98 - RNA, 19 nt, Homo sapiens
aaaauccuuuuuguuuuuc

SEQ ID NO: 99 - RNA, 19 nt, Homo sapiens
aacucugccucucccucug

SEQ ID NO: 100 - RNA, 19 nt, Homo sapiens
augcuugaugagaaugcca

SEQ ID NO: 101 - RNA, 19 nt, Homo sapiens
cagccuggagcucccugug

SEQ ID NO: 102 - RNA, 19 nt, Homo sapiens
uuuccucuucuuaacacca

SEQ ID NO: 103 - RNA, 18 nt, Homo sapiens
aacucagugagcucuugu

SEQ ID NO: 104 - RNA, 18 nt, Homo sapiens
acuguuuuguggacaaau

SEQ ID NO: 105 - RNA, 18 nt, Homo sapiens
cucggugccuggaaugag

SEQ ID NO: 106 - RNA, 18 nt, Homo sapiens
gccccggcggcgggggca

SEQ ID NO: 107 - RNA, 18 nt, Homo sapiens
guaucccacuucugacac

SEQ ID NO: 108 - RNA, 17 nt, Homo sapiens
cagcuucaggauagguu

SEQ ID NO: 109 - RNA, 17 nt, Homo sapiens
uuaaagccaagaacacc

SEQ ID NO: 110 - RNA, 16 nt, Homo sapiens
ucggagggaagcugac

SEQ ID NO: 111 - RNA, 22 nt, Homo sapiens
aacugguagugucagccuccug

SEQ ID NO: 112 - RNA, 22 nt, Homo sapiens
agagcgagacuccaacucagaa

SEQ ID NO: 113 - RNA, 22 nt, Homo sapiens
agucaccgacgagaccagaagu

SEQ ID NO: 114 - RNA, 22 nt, Homo sapiens
uccucgcccagggccaccgacu

SEQ ID NO: 115 - RNA, 22 nt, Homo sapiens
uugggaaagacaaacucagagu

SEQ ID NO: 116 - RNA, 21 nt, Homo sapiens
acgaugagauguucuccgaca

SEQ ID NO: 117 - RNA, 21 nt, Homo sapiens
auuuuguugcgagguucugag

SEQ ID NO: 118 - RNA, 21 nt, Homo sapiens
cagugccucggcagugcagcc

SEQ ID NO: 119 - RNA, 21 nt, Homo sapiens
uugugaagaaagaaauucuua

SEQ ID NO: 120 - RNA, 20 nt, Homo sapiens
agaaaugcuggacacaggaa

SEQ ID NO: 121 - RNA, 20 nt, Homo sapiens
aggcggaacgauacggcagc

SEQ ID NO: 122 - RNA, 20 nt, Homo sapiens
cauucgugggaccgaguuuc

SEQ ID NO: 123 - RNA, 20 nt, Homo sapiens
ucuccaggccaaagccgcgu

SEQ ID NO: 124 - RNA, 19 nt, Homo sapiens
aaagaaucuuguuaugcuc

SEQ ID NO: 125 - RNA, 19 nt, Homo sapiens
aaggacgagggaccgcacu

SEQ ID NO: 126 - RNA, 17 nt, Homo sapiens
aaagaaacaggagggac

SEQ ID NO: 127 - RNA, 17 nt, Homo sapiens
agcagcucucagcauuc

SEQ ID NO: 128 - RNA, 17 nt, Homo sapiens
auaaaaacacagcacuc

SEQ ID NO: 129 - RNA, 17 nt, Homo sapiens
ccgacgaggaagcgagg

SEQ ID NO: 130 - RNA, 17 nt, Homo sapiens
ugugcacacaaacuguu

SEQ ID NO: 131 - RNA, 22 nt, Homo sapiens
aaaaaccgcaauuauuuuugcu

SEQ ID NO: 132 - RNA, 22 nt, Homo sapiens
aaaccagagcuucccucauuua

SEQ ID NO: 133 - RNA, 22 nt, Homo sapiens
aacacggcgugcgccugguggg

SEQ ID NO: 134 - RNA, 22 nt, Homo sapiens
aacagaggcccuggggugugcu

SEQ ID NO: 135 - RNA, 22 nt, Homo sapiens
aacguccgagcgggcggccgag

SEQ ID NO: 136 - RNA, 22 nt, Homo sapiens
aacgugacagugacugugagaa

SEQ ID NO: 137 - RNA, 22 nt, Homo sapiens
aagagcuucaguguuaggacug

SEQ ID NO: 138 - RNA, 22 nt, Homo sapiens
aagcggcuuuuggaaaguggcu

SEQ ID NO: 139 - RNA, 22 nt, Homo sapiens
aaguggcacagccagggauuga

SEQ ID NO: 140 - RNA, 22 nt, Homo sapiens
agaagcugagcugacuaugccu

SEQ ID NO: 141 - RNA, 22 nt, Homo sapiens
agcgguuaggcguacggccagg

SEQ ID NO: 142 - RNA, 22 nt, Homo sapiens
agcuguggucucugagagacug

SEQ ID NO: 143 - RNA, 22 nt, Homo sapiens
aggaagcgaguguguauuucug

SEQ ID NO: 144 - RNA, 22 nt, Homo sapiens
aggcgcugcugcgggccgugcg

SEQ ID NO: 145 - RNA, 22 nt, Homo sapiens
aguacguggagccacauacaua

SEQ ID NO: 146 - RNA, 22 nt, Homo sapiens
aguggaccguugaggagagcga

SEQ ID NO: 147 - RNA, 22 nt, Homo sapiens
aguuuuguuucucuuucuccuu

SEQ ID NO: 148 - RNA, 22 nt, Homo sapiens
aucauaccauuccuuggaugaa

SEQ ID NO: 149 - RNA, 22 nt, Homo sapiens
aucccuggcugcuaagcccuug

SEQ ID NO: 150 - RNA, 22 nt, Homo sapiens
augcauuuucucugugaggcau

SEQ ID NO: 151 - RNA, 22 nt, Homo sapiens
augcugcugcacucaaucuugg

SEQ ID NO: 152 - RNA, 22 nt, Homo sapiens
augggcuuuggucuuuuugacu

SEQ ID NO: 153 - RNA, 22 nt, Homo sapiens
augugcaggagcugccucugga

SEQ ID NO: 154 - RNA, 22 nt, Homo sapiens
auguuaugaugcacagcagaag

SEQ ID NO: 155 - RNA, 22 nt, Homo sapiens
auugaauaagaauggggagagu

SEQ ID NO: 156 - RNA, 22 nt, Homo sapiens
cacaggcccuggaggucucccu

SEQ ID NO: 157 - RNA, 22 nt, Homo sapiens
cagacucgaccucccaggcuua

SEQ ID NO: 158 - RNA, 22 nt, Homo sapiens
cagagauguggcugugucuagu

SEQ ID NO: 159 - RNA, 22 nt, Homo sapiens
cagcaaaagucagcuggauauu

SEQ ID NO: 160 - RNA, 22 nt, Homo sapiens
caggggacacggaugccaggaa

SEQ ID NO: 161 - RNA, 22 nt, Homo sapiens
caucgcccugcuggagcuggag

SEQ ID NO: 162 - RNA, 22 nt, Homo sapiens
ccaaccuugugaggcugagcug

SEQ ID NO: 163 - RNA, 22 nt, Homo sapiens
ccaugcacuguugugaggaaaa

SEQ ID NO: 164 - RNA, 22 nt, Homo sapiens
cccgguuccgccugcggcucug

SEQ ID NO: 165 - RNA, 22 nt, Homo sapiens
cgagacaguaguucuugccugg

SEQ ID NO: 166 - RNA, 22 nt, Homo sapiens
cgcuuccugguggguccagugu

SEQ ID NO: 167 - RNA, 22 nt, Homo sapiens
cuaucaggacaggaauccagcu

SEQ ID NO: 168 - RNA, 22 nt, Homo sapiens
cuccugaaacuuugcuguaagu

SEQ ID NO: 169 - RNA, 22 nt, Homo sapiens
cugcugcugcgggcacgccgag

SEQ ID NO: 170 - RNA, 22 nt, Homo sapiens
cugugugugagaaauggcaggu

SEQ ID NO: 171 - RNA, 22 nt, Homo sapiens
cuugcugacacuuugucauccg

SEQ ID NO: 172 - RNA, 22 nt, Homo sapiens
cuuguuugggucuugaguguag

SEQ ID NO: 173 - RNA, 22 nt, Homo sapiens
gaagacagacccccagacaggg

SEQ ID NO: 174 - RNA, 22 nt, Homo sapiens
gacccgugggacgcggcugaga

SEQ ID NO: 175 - RNA, 22 nt, Homo sapiens
gcacucugugggccuggagggu

SEQ ID NO: 176 - RNA, 22 nt, Homo sapiens
gcccugcggggccuaccgccug

SEQ ID NO: 177 - RNA, 22 nt, Homo sapiens
gccgcuucugcuggcugagcug

SEQ ID NO: 178 - RNA, 22 nt, Homo sapiens
gccgggcacgguggcucacuuu

SEQ ID NO: 179 - RNA, 22 nt, Homo sapiens
gguggccugagcaguuccacga

SEQ ID NO: 180 - RNA, 22 nt, Homo sapiens
guucugccucuguccagguccu

SEQ ID NO: 181 - RNA, 22 nt, Homo sapiens
ucaguugaauaugagcuauacu

SEQ ID NO: 182 - RNA, 22 nt, Homo sapiens
uccuuucuguggggcugagucu

SEQ ID NO: 183 - RNA, 22 nt, Homo sapiens
ugagugacucuggacuggagaa

SEQ ID NO: 184 - RNA, 22 nt, Homo sapiens
ugcuacuuucacugcuauagua

SEQ ID NO: 185 - RNA, 22 nt, Homo sapiens
ugcuauguucucauccuacagu

SEQ ID NO: 186 - RNA, 22 nt, Homo sapiens
uggucacagugccagcuuacuu

SEQ ID NO: 187 - RNA, 22 nt, Homo sapiens
uguccucuagggccugcagucu

SEQ ID NO: 188 - RNA, 22 nt, Homo sapiens
uugauuucagcauuuaacugag

SEQ ID NO: 189 - RNA, 22 nt, Homo sapiens
uugcauguggaaaugucugcuu

SEQ ID NO: 190 - RNA, 22 nt, Homo sapiens
uuuccggcucgcgugggugugu

SEQ ID NO: 191 - RNA, 21 nt, Homo sapiens
aaaaguauuugcggguuuugu

SEQ ID NO: 192 - RNA, 21 nt, Homo sapiens
aaagcucucggucaaguucaa

SEQ ID NO: 193 - RNA, 21 nt, Homo sapiens
aagagccuucuggccagccug

SEQ ID NO: 194 - RNA, 21 nt, Homo sapiens
accugaauuaccaaaagcuuu

SEQ ID NO: 195 - RNA, 21 nt, Homo sapiens
agucacaaucccuggaggaag

SEQ ID NO: 196 - RNA, 21 nt, Homo sapiens
augaguuuggggaaagaguug

SEQ ID NO: 197 - RNA, 21 nt, Homo sapiens
auucucuggucagcagacagg

SEQ ID NO: 198 - RNA, 21 nt, Homo sapiens
cauuguaaguuaggaugcaug

SEQ ID NO: 199 - RNA, 21 nt, Homo sapiens
ccccugggcuguuacuguucc

SEQ ID NO: 200 - RNA, 21 nt, Homo sapiens
cccuccuaccuuuucuccuaa

SEQ ID NO: 201 - RNA, 21 nt, Homo sapiens
cgaaaacagcaauuaccuuug

SEQ ID NO: 202 - RNA, 21 nt, Homo sapiens
gcucauuuaaguagucugaug

SEQ ID NO: 203 - RNA, 21 nt, Homo sapiens
ucaucaggagcaaaugauaaa

SEQ ID NO: 204 - RNA, 21 nt, Homo sapiens
ucaugcccaguugcuuccugu

SEQ ID NO: 205 - RNA, 21 nt, Homo sapiens
uccuggacaggcaccuccagg

SEQ ID NO: 206 - RNA, 21 nt, Homo sapiens
ucucccuacuaucuucccuag

SEQ ID NO: 207 - RNA, 21 nt, Homo sapiens
ugaagacccugaccggcaaga

SEQ ID NO: 208 - RNA, 21 nt, Homo sapiens
ugacgauugagcacagucagg

SEQ ID NO: 209 - RNA, 21 nt, Homo sapiens
ugccgugugucuugcauaauu

SEQ ID NO: 210 - RNA, 21 nt, Homo sapiens
ugcgggcacgaggagacggcc

SEQ ID NO: 211 - RNA, 21 nt, Homo sapiens
uuaugccggaugugcuuuucu

SEQ ID NO: 212 - RNA, 21 nt, Homo sapiens
uugccuuccugaaaaguuuuu

SEQ ID NO: 213 - RNA, 20 nt, Homo sapiens
aaaagucccucugagcuuac

SEQ ID NO: 214 - RNA, 20 nt, Homo sapiens
aacagagugagacugugucg

SEQ ID NO: 215 - RNA, 20 nt, Homo sapiens
aauggauugcugguugugga

SEQ ID NO: 216 - RNA, 20 nt, Homo sapiens
augcugccuuuggucucuga

SEQ ID NO: 217 - RNA, 20 nt, Homo sapiens
cagguugcugggcuuugccc

SEQ ID NO: 218 - RNA, 20 nt, Homo sapiens
gagcagguuuccgugaagcc

SEQ ID NO: 219 - RNA, 20 nt, Homo sapiens
ucgcgguuugugccagauga

SEQ ID NO: 220 - RNA, 20 nt, Homo sapiens
ugucccgcugcguguuuucc

SEQ ID NO: 221 - RNA, 19 nt, Homo sapiens
aacaggagaaaguuacuga

SEQ ID NO: 222 - RNA, 19 nt, Homo sapiens
agcgagcggagccgcgguc

SEQ ID NO: 223 - RNA, 19 nt, Homo sapiens
agguaaauuaauacucagc

SEQ ID NO: 224 - RNA, 19 nt, Homo sapiens
agucggcgucuccauccug

SEQ ID NO: 225 - RNA, 19 nt, Homo sapiens
aucugaaacacuuccuaug

SEQ ID NO: 226 - RNA, 19 nt, Homo sapiens
aucugggugccacagugga

SEQ ID NO: 227 - RNA, 19 nt, Homo sapiens
cuucuucaggccgaauagg

SEQ ID NO: 228 - RNA, 19 nt, Homo sapiens
cuuuucauagagcaguuag

SEQ ID NO: 229 - RNA, 19 nt, Homo sapiens
uggccggcggcgaccucgg

SEQ ID NO: 230 - RNA, 19 nt, Homo sapiens
uucuugugcuaagcagaac

SEQ ID NO: 231 - RNA, 19 nt, Homo sapiens
uugcugauucuacugccaa

SEQ ID NO: 232 - RNA, 18 nt, Homo sapiens
aacuuggacgucagagaa

SEQ ID NO: 233 - RNA, 18 nt, Homo sapiens
aaggauguucgucguggc

SEQ ID NO: 234 - RNA, 18 nt, Homo sapiens
aaggcuuuaacugagaac

SEQ ID NO: 235 - RNA, 18 nt, Homo sapiens
agcagugaauguggauga

SEQ ID NO: 236 - RNA, 18 nt, Homo sapiens
auaugagaggcaggcuga

SEQ ID NO: 237 - RNA, 18 nt, Homo sapiens
aucucccaguucuguguc

SEQ ID NO: 238 - RNA, 18 nt, Homo sapiens
aucucugugugugaacug

SEQ ID NO: 239 - RNA, 18 nt, Homo sapiens
cccucgaaaggacaucug

SEQ ID NO: 240 - RNA, 18 nt, Homo sapiens
cucugcuggccaguguga

SEQ ID NO: 241 - RNA, 18 nt, Homo sapiens
gaauggucuuagcacucu

SEQ ID NO: 242 - RNA, 18 nt, Homo sapiens
gggagguacagaauuggc

SEQ ID NO: 243 - RNA, 18 nt, Homo sapiens
gggugcuguaggcuuuga

SEQ ID NO: 244 - RNA, 18 nt, Homo sapiens
uccacggcaucugcgucu

SEQ ID NO: 245 - RNA, 18 nt, Homo sapiens
uccgaggccucagcgcag

SEQ ID NO: 246 - RNA, 18 nt, Homo sapiens
ugaggaauuuggccagac

SEQ ID NO: 247 - RNA, 18 nt, Homo sapiens
ugcaaaccagccagaaau

SEQ ID NO: 248 - RNA, 18 nt, Homo sapiens
uggcuaagauacugcuga

SEQ ID NO: 249 - RNA, 17 nt, Homo sapiens
aagggcuggauugaggc

SEQ ID NO: 250 - RNA, 17 nt, Homo sapiens
agaaauuuugguuaaau

SEQ ID NO: 251 - RNA, 17 nt, Homo sapiens
caagagaagagcucaac

SEQ ID NO: 252 - RNA, 17 nt, Homo sapiens
cagucccaaggguuugg

SEQ ID NO: 253 - RNA, 17 nt, Homo sapiens
cggcauggcaaaggaaa

SEQ ID NO: 254 - RNA, 17 nt, Homo sapiens
cugaagggccuugacga

SEQ ID NO: 255 - RNA, 17 nt, Homo sapiens
cuggcggggcggggcgg

SEQ ID NO: 256 - RNA, 17 nt, Homo sapiens
guagcaccguggaaagc

SEQ ID NO: 257 - RNA, 17 nt, Homo sapiens
uacuccaagaguuaggg

SEQ ID NO: 258 - RNA, 16 nt, Homo sapiens
cgggcggcggaggggc

SEQ ID NO: 259 - RNA, 16 nt, Homo sapiens
cuucaugggccagaaa

SEQ ID NO: 260 - RNA, 16 nt, Homo sapiens
gccaaagccuccacca

SEQ ID NO: 261 - RNA, 15 nt, Homo sapiens
agacuacacucucag

SEQ ID NO: 262 - RNA, 22 nt, Homo sapiens
aaaugcaacaguagauagcaga

SEQ ID NO: 263 - RNA, 22 nt, Homo sapiens
aagcuuacugcucuggguuaga

SEQ ID NO: 264 - RNA, 22 nt, Homo sapiens
aaugugugcucuguaaguuugu

SEQ ID NO: 265 - RNA, 22 nt, Homo sapiens
accucugagcucacucgcuggu

SEQ ID NO: 266 - RNA, 22 nt, Homo sapiens
agaacgcuguccgcagcuugcg

SEQ ID NO: 267 - RNA, 22 nt, Homo sapiens
agagccauuucacugcucgguu

SEQ ID NO: 268 - RNA, 22 nt, Homo sapiens
agagcgaggccagccuagaggu

SEQ ID NO: 269 - RNA, 22 nt, Homo sapiens
agagcucggcugugauggcgcu

SEQ ID NO: 270 - RNA, 22 nt, Homo sapiens
agcagcugaguggcuauuuccu

SEQ ID NO: 271 - RNA, 22 nt, Homo sapiens
aggacaaguuugagaauuuuug

SEQ ID NO: 272 - RNA, 22 nt, Homo sapiens
aggccgccaggggggccggcug

SEQ ID NO: 273 - RNA, 22 nt, Homo sapiens
aggcugggcucgaacuccugga

SEQ ID NO: 274 - RNA, 22 nt, Homo sapiens
agggcggugucugagccugccg

SEQ ID NO: 275 - RNA, 22 nt, Homo sapiens
aguccuguuguuugcgagcaaa

SEQ ID NO: 276 - RNA, 22 nt, Homo sapiens
agugccacgugucugggccacu

SEQ ID NO: 277 - RNA, 22 nt, Homo sapiens
aguguuuuuguccuuuggggua

SEQ ID NO: 278 - RNA, 22 nt, Homo sapiens
auccugcugaagcuuggaacuu

SEQ ID NO: 279 - RNA, 22 nt, Homo sapiens
aucuuacugucauuguccuaaa

SEQ ID NO: 280 - RNA, 22 nt, Homo sapiens
augaccuaagaccuguucuuaa

SEQ ID NO: 281 - RNA, 22 nt, Homo sapiens
augcugagccugcgaggccuga

SEQ ID NO: 282 - RNA, 22 nt, Homo sapiens
auuaggagugcucuguuguuua

SEQ ID NO: 283 - RNA, 22 nt, Homo sapiens
auugggcgccuggucaccaggg

SEQ ID NO: 284 - RNA, 22 nt, Homo sapiens
caagcuuggcugcuuuccuaga

SEQ ID NO: 285 - RNA, 22 nt, Homo sapiens
caucggcugagagggcguagga

SEQ ID NO: 286 - RNA, 22 nt, Homo sapiens
ccuguaggcagugcuaaaaaau

SEQ ID NO: 287 - RNA, 22 nt, Homo sapiens
cugcuuucuccucuggcgggag

SEQ ID NO: 288 - RNA, 22 nt, Homo sapiens
cuucaugaaccccuugcccacu

SEQ ID NO: 289 - RNA, 22 nt, Homo sapiens
gaccggcagcacaggagagauu

SEQ ID NO: 290 - RNA, 22 nt, Homo sapiens
gacuguggcggcggcggccucg

SEQ ID NO: 291 - RNA, 22 nt, Homo sapiens
gaggcugcagagcaucguggag

SEQ ID NO: 292 - RNA, 22 nt, Homo sapiens
gaguggcaaagucuuuccauau

SEQ ID NO: 293 - RNA, 22 nt, Homo sapiens
gcggaggccuggggcugcagcu

SEQ ID NO: 294 - RNA, 22 nt, Homo sapiens
ggaaucauccugagagcuuccu

SEQ ID NO: 295 - RNA, 22 nt, Homo sapiens
ggagcuggaggugcuggagagg

SEQ ID NO: 296 - RNA, 22 nt, Homo sapiens
uaugaaccgugcguguuugauu

SEQ ID NO: 297 - RNA, 22 nt, Homo sapiens
ugucaaacgaggcuucuguuuu

SEQ ID NO: 298 - RNA, 22 nt, Homo sapiens
uguuuaaccuuuugccuguugg

SEQ ID NO: 299 - RNA, 22 nt, Homo sapiens
uugggcagccagaggaaugcau

SEQ ID NO: 300 - RNA, 22 nt, Homo sapiens
uuggggaaacggccgcugagug

SEQ ID NO: 301 - RNA, 21 nt, Homo sapiens
aaaauccugucacugcaaugg

SEQ ID NO: 302 - RNA, 21 nt, Homo sapiens
aaugccuggaaacuuggugcu

SEQ ID NO: 303 - RNA, 21 nt, Homo sapiens
accucguggguccugaacuga

SEQ ID NO: 304 - RNA, 21 nt, Homo sapiens
acugacccugcuugguggggu

SEQ ID NO: 305 - RNA, 21 nt, Homo sapiens
acuugaggauaggguuaaagu

SEQ ID NO: 306 - RNA, 21 nt, Homo sapiens
aggagcugagcauuugugcuu

SEQ ID NO: 307 - RNA, 21 nt, Homo sapiens
aggcccgagcauucugaagug

SEQ ID NO: 308 - RNA, 21 nt, Homo sapiens
aggcuggugcaaaaguaaugg

SEQ ID NO: 309 - RNA, 21 nt, Homo sapiens
agggcccuccaggcccuccgg

SEQ ID NO: 310 - RNA, 21 nt, Homo sapiens
agggcgggugggcugaccacc

SEQ ID NO: 311 - RNA, 21 nt, Homo sapiens
agucuccccucauggaaggcc

SEQ ID NO: 312 - RNA, 21 nt, Homo sapiens
agugccugagggaguaagagc

SEQ ID NO: 313 - RNA, 21 nt, Homo sapiens
aucuguuucgugaggcucuca

SEQ ID NO: 314 - RNA, 21 nt, Homo sapiens
augagagcguuugccgacgca

SEQ ID NO: 315 - RNA, 21 nt, Homo sapiens
cacucaggggaggcgggaaag

SEQ ID NO: 316 - RNA, 21 nt, Homo sapiens
cccggcgggccgcccgccucc

SEQ ID NO: 317 - RNA, 21 nt, Homo sapiens
gagggcccuuccgcggcccgg

SEQ ID NO: 318 - RNA, 21 nt, Homo sapiens
gauggagucuugcucuuugcc

SEQ ID NO: 319 - RNA, 21 nt, Homo sapiens
gcacgacgaugaggugacagu

SEQ ID NO: 320 - RNA, 21 nt, Homo sapiens
gcuaccucucuggguucuguu

SEQ ID NO: 321 - RNA, 21 nt, Homo sapiens
gcugcuuggucuguuuacaau

SEQ ID NO: 322 - RNA, 21 nt, Homo sapiens
gcuuguggcucuucugccugc

SEQ ID NO: 323 - RNA, 21 nt, Homo sapiens
ggcgugggccuuuucucugca

SEQ ID NO: 324 - RNA, 21 nt, Homo sapiens
gggcgagugacagccccggcu

SEQ ID NO: 325 - RNA, 21 nt, Homo sapiens
guccaugcgcuccucgcgggc

SEQ ID NO: 326 - RNA, 21 nt, Homo sapiens
uccguccgcguguggaagguc

SEQ ID NO: 327 - RNA, 21 nt, Homo sapiens
ucuuugcuguugugaacaaug

SEQ ID NO: 328 - RNA, 21 nt, Homo sapiens
ugcucagcucugaccaugucu

SEQ ID NO: 329 - RNA, 21 nt, Homo sapiens
uucuccgugggcuacuagcgg

SEQ ID NO: 330 - RNA, 21 nt, Homo sapiens
uucuccugaccuggggagucg

SEQ ID NO: 331 - RNA, 21 nt, Homo sapiens
uucuucuccagcaccugcaga

SEQ ID NO: 332 - RNA, 21 nt, Homo sapiens
uuggccuuggcgcgggccuug

SEQ ID NO: 333 - RNA, 21 nt, Homo sapiens
uuucagaaauugggagaagug

SEQ ID NO: 334 - RNA, 20 nt, Homo sapiens
aagauguuucguguagaaag

SEQ ID NO: 335 - RNA, 20 nt, Homo sapiens
aagugagggaacugagauuu

SEQ ID NO: 336 - RNA, 20 nt, Homo sapiens
agcacucugggauuuggcug

SEQ ID NO: 337 - RNA, 20 nt, Homo sapiens
aggggaugugagcauaugua

SEQ ID NO: 338 - RNA, 20 nt, Homo sapiens
aucgacgauuguccaggaaa

SEQ ID NO: 339 - RNA, 20 nt, Homo sapiens
augcaucucuuggcuguacu

SEQ ID NO: 340 - RNA, 20 nt, Homo sapiens
augcucaauauucccagaau

SEQ ID NO: 341 - RNA, 20 nt, Homo sapiens
augggcuauuuuaaaaaauc

SEQ ID NO: 342 - RNA, 20 nt, Homo sapiens
auucggagauugcauaguag

SEQ ID NO: 343 - RNA, 20 nt, Homo sapiens
cagccuccggcagacacagg

SEQ ID NO: 344 - RNA, 20 nt, Homo sapiens
cccucacacagcugggagaa

SEQ ID NO: 345 - RNA, 20 nt, Homo sapiens
ccuguguuaaggagcaaccu

SEQ ID NO: 346 - RNA, 20 nt, Homo sapiens
cugccagucaggcaggaaug

SEQ ID NO: 347 - RNA, 20 nt, Homo sapiens
ggcgcugcccgcugucacuc

SEQ ID NO: 348 - RNA, 20 nt, Homo sapiens
uaacccaaacuagaguuguu

SEQ ID NO: 349 - RNA, 20 nt, Homo sapiens
uccccaggcaggcuuuggag

SEQ ID NO: 350 - RNA, 20 nt, Homo sapiens
uccugaccuggcaccugccc

SEQ ID NO: 351 - RNA, 20 nt, Homo sapiens
ucuaccugaggcuguugguc

SEQ ID NO: 352 - RNA, 20 nt, Homo sapiens
ugcucacuucuuccugggga

SEQ ID NO: 353 - RNA, 19 nt, Homo sapiens
aagcacagggcagcgagag

SEQ ID NO: 354 - RNA, 19 nt, Homo sapiens
accagaggagccccaaaac

SEQ ID NO: 355 - RNA, 19 nt, Homo sapiens
augcuggucauugaugauu

SEQ ID NO: 356 - RNA, 19 nt, Homo sapiens
cagggaaugguggcucacg

SEQ ID NO: 357 - RNA, 19 nt, Homo sapiens
ccuccacgcguuccagguc

SEQ ID NO: 358 - RNA, 19 nt, Homo sapiens
gcugcagcugcugggaugc

SEQ ID NO: 359 - RNA, 19 nt, Homo sapiens
uccaccgcugagaguugaa

SEQ ID NO: 360 - RNA, 19 nt, Homo sapiens
ugucccaucugggucgcca

SEQ ID NO: 361 - RNA, 19 nt, Homo sapiens
uugccugcucucuguggaa

SEQ ID NO: 362 - RNA, 18 nt, Homo sapiens
aauaaacaugguguaucu

SEQ ID NO: 363 - RNA, 18 nt, Homo sapiens
aauguucuuguuacaaaa

SEQ ID NO: 364 - RNA, 18 nt, Homo sapiens
acugaagacuggagcgcu

SEQ ID NO: 365 - RNA, 18 nt, Homo sapiens
agguugcugaauagacga

SEQ ID NO: 366 - RNA, 18 nt, Homo sapiens
augaagcacaggggucga

SEQ ID NO: 367 - RNA, 18 nt, Homo sapiens
cagagucagaaagcuaaa

SEQ ID NO: 368 - RNA, 18 nt, Homo sapiens
cugugccgcgcaguuagg

SEQ ID NO: 369 - RNA, 18 nt, Homo sapiens
gaggagccuguucuaacc

SEQ ID NO: 370 - RNA, 18 nt, Homo sapiens
gcauaagcuauuugcggc

SEQ ID NO: 371 - RNA, 18 nt, Homo sapiens
gcucuggggcggcauugc

SEQ ID NO: 372 - RNA, 18 nt, Homo sapiens
ggcuggaagagcaacaga

SEQ ID NO: 373 - RNA, 18 nt, Homo sapiens
uaguucuuguugcucuac

SEQ ID NO: 374 - RNA, 18 nt, Homo sapiens
uuggauuggcauggcggc

SEQ ID NO: 375 - RNA, 18 nt, Homo sapiens
uugucucucuguuucuca

SEQ ID NO: 376 - RNA, 17 nt, Homo sapiens
aaaaacaacgaccuggg

SEQ ID NO: 377 - RNA, 17 nt, Homo sapiens
aaaccuacugucucugu

SEQ ID NO: 378 - RNA, 17 nt, Homo sapiens
ccauacuuggggauggg

SEQ ID NO: 379 - RNA, 17 nt, Homo sapiens
ccugaaaugaugacucu

SEQ ID NO: 380 - RNA, 17 nt, Homo sapiens
ggcgggcggcggagggg

SEQ ID NO: 381 - RNA, 16 nt, Homo sapiens
aggaagcgcuucaguc

SEQ ID NO: 382 - RNA, 16 nt, Homo sapiens
ccuacugggggcacca

SEQ ID NO: 383 - RNA, 16 nt, Homo sapiens
ucuuacucaaaggcaa

SEQ ID NO: 384 - RNA, 15 nt, Homo sapiens
ccuggagguaccacc

SEQ ID NO: 385 - RNA, 15 nt, Homo sapiens
cgugcgucccuacag

SEQ ID NO: 386 - RNA, 22 nt, Homo sapiens
aaaugacguggcagcagcagug

SEQ ID NO: 387 - RNA, 22 nt, Homo sapiens
aaauuuuggugaaguauuaaau

SEQ ID NO: 388 - RNA, 22 nt, Homo sapiens
aaccugcgucccaagaagaagg

SEQ ID NO: 389 - RNA, 22 nt, Homo sapiens
aacggccugcgcagggugcugg

SEQ ID NO: 390 - RNA, 22 nt, Homo sapiens
aacucccacuguguggacugcg

SEQ ID NO: 391 - RNA, 22 nt, Homo sapiens
aacuugacaagacugcugcaaa

SEQ ID NO: 392 - RNA, 22 nt, Homo sapiens
aauuccaaggggaaaacuggug

SEQ ID NO: 393 - RNA, 22 nt, Homo sapiens
aauuuccaguuggaaaaauuag

SEQ ID NO: 394 - RNA, 22 nt, Homo sapiens
acuuugcuaagacuugcuuucu

SEQ ID NO: 395 - RNA, 22 nt, Homo sapiens
agacuccggagggcagaggcug

SEQ ID NO: 396 - RNA, 22 nt, Homo sapiens
agagaagguacauagagacauu

SEQ ID NO: 397 - RNA, 22 nt, Homo sapiens
agagaggacuuuggccuagaua

SEQ ID NO: 398 - RNA, 22 nt, Homo sapiens
agguucugagggaaguccucug

SEQ ID NO: 399 - RNA, 22 nt, Homo sapiens
augcugcaucugccccugugcu

SEQ ID NO: 400 - RNA, 22 nt, Homo sapiens
augcuggaaguuuguccaugau

SEQ ID NO: 401 - RNA, 22 nt, Homo sapiens
augucuguaagccuugagcaga

SEQ ID NO: 402 - RNA, 22 nt, Homo sapiens
cacguauguauaucuugcccuu

SEQ ID NO: 403 - RNA, 22 nt, Homo sapiens
cacugaguuuccugggugauuu

SEQ ID NO: 404 - RNA, 22 nt, Homo sapiens
cagccugccaggacucgcagug

SEQ ID NO: 405 - RNA, 22 nt, Homo sapiens
caugggcaggaggcccuugaga

SEQ ID NO: 406 - RNA, 22 nt, Homo sapiens
cauugauguucaucaugcaugg

SEQ ID NO: 407 - RNA, 22 nt, Homo sapiens
ccaaagauugccacguugcaag

SEQ ID NO: 408 - RNA, 22 nt, Homo sapiens
cccggcgaggcagggcuucuaa

SEQ ID NO: 409 - RNA, 22 nt, Homo sapiens
cccgggagcacuugagagcugu

SEQ ID NO: 410 - RNA, 22 nt, Homo sapiens
ccucucugcugagcggguggcu

SEQ ID NO: 411 - RNA, 22 nt, Homo sapiens
cgauggggcugggcccuggccu

SEQ ID NO: 412 - RNA, 22 nt, Homo sapiens
cgcguggggcggagcuuccgga

SEQ ID NO: 413 - RNA, 22 nt, Homo sapiens
cgggcacugcagcagcucaggu

SEQ ID NO: 414 - RNA, 22 nt, Homo sapiens
cggugacccggcuagccggccg

SEQ ID NO: 415 - RNA, 22 nt, Homo sapiens
cuaugcagagcuggcgguuuug

SEQ ID NO: 416 - RNA, 22 nt, Homo sapiens
cucgaccggaccucgaccggcu

SEQ ID NO: 417 - RNA, 22 nt, Homo sapiens
cucggagccgccucgcuccucu

SEQ ID NO: 418 - RNA, 22 nt, Homo sapiens
cugccugcuguaucuuccaugu

SEQ ID NO: 419 - RNA, 22 nt, Homo sapiens
cugcuuaauacgcuccgcggaa

SEQ ID NO: 420 - RNA, 22 nt, Homo sapiens
cuggagaugcuggcuguuuuuu

SEQ ID NO: 421 - RNA, 22 nt, Homo sapiens
cugggaggaguucagccgcgcu

SEQ ID NO: 422 - RNA, 22 nt, Homo sapiens
cuuaaucccaggagccugcacg

SEQ ID NO: 423 - RNA, 22 nt, Homo sapiens
gucaaggagucgcaggucgccu

SEQ ID NO: 424 - RNA, 22 nt, Homo sapiens
uccagacugaggaagacccgga

SEQ ID NO: 425 - RNA, 22 nt, Homo sapiens
uccugugagagucugaaggaua

SEQ ID NO: 426 - RNA, 22 nt, Homo sapiens
ucugcucugaagucuugcauuu

SEQ ID NO: 427 - RNA, 22 nt, Homo sapiens
ugagccaccgcgcacggccugg

SEQ ID NO: 428 - RNA, 22 nt, Homo sapiens
ugaguucaggcagugggcagaa

SEQ ID NO: 429 - RNA, 22 nt, Homo sapiens
uggguuccugccaggcuugaag

SEQ ID NO: 430 - RNA, 22 nt, Homo sapiens
ugucagcuuggaaggaccuguu

SEQ ID NO: 431 - RNA, 22 nt, Homo sapiens
uucaaagcagagggcccugaag

SEQ ID NO: 432 - RNA, 22 nt, Homo sapiens
uugagcagccuuucugcugauu

SEQ ID NO: 433 - RNA, 22 nt, Homo sapiens
uugcuuaaccuugcccucgaaa

SEQ ID NO: 434 - RNA, 22 nt, Homo sapiens
uuggcugguccgaugguagugg

SEQ ID NO: 435 - RNA, 22 nt, Homo sapiens
uuuggcaguccuuaccaagcaa

SEQ ID NO: 436 - RNA, 21 nt, Homo sapiens
aaaaucaauggagugguuuuu

SEQ ID NO: 437 - RNA, 21 nt, Homo sapiens
agagucugagccugugagaac

SEQ ID NO: 438 - RNA, 21 nt, Homo sapiens
aguccucccacgaggcauacu

SEQ ID NO: 439 - RNA, 21 nt, Homo sapiens
augucccugcgggcggcuguc

SEQ ID NO: 440 - RNA, 21 nt, Homo sapiens
auguucauggcauugcuguac

SEQ ID NO: 441 - RNA, 21 nt, Homo sapiens
auuguuuugcuagguguucau

SEQ ID NO: 442 - RNA, 21 nt, Homo sapiens
auuuugcuuucuguuuacaaa

SEQ ID NO: 443 - RNA, 21 nt, Homo sapiens
cagaggaggggacggcagcac

SEQ ID NO: 444 - RNA, 21 nt, Homo sapiens
cagucagcaaagccugggaga

SEQ ID NO: 445 - RNA, 21 nt, Homo sapiens
ccaggagccuucuuccuugaa

SEQ ID NO: 446 - RNA, 21 nt, Homo sapiens
cccagcugcuuggaagucuga

SEQ ID NO: 447 - RNA, 21 nt, Homo sapiens
ccuuccagacagagacucugu

SEQ ID NO: 448 - RNA, 21 nt, Homo sapiens
cggcggcggcggcgacucugc

SEQ ID NO: 449 - RNA, 21 nt, Homo sapiens
cguguucauugcagcacuguu

SEQ ID NO: 450 - RNA, 21 nt, Homo sapiens
cuuccagcgauuuugaaauac

SEQ ID NO: 451 - RNA, 21 nt, Homo sapiens
gccacgagagggcacugcagg

SEQ ID NO: 452 - RNA, 21 nt, Homo sapiens
gcugcuagcccccaggggcac

SEQ ID NO: 453 - RNA, 21 nt, Homo sapiens
ggucgcaacgcugugggcguu

SEQ ID NO: 454 - RNA, 21 nt, Homo sapiens
ucagaagcaguuugccuuguc

SEQ ID NO: 455 - RNA, 21 nt, Homo sapiens
ucggaagagcgcuccggccac

SEQ ID NO: 456 - RNA, 21 nt, Homo sapiens
ucgggcgagccucgggggcug

SEQ ID NO: 457 - RNA, 21 nt, Homo sapiens
ucuccaggggcagucugccac

SEQ ID NO: 458 - RNA, 21 nt, Homo sapiens
ugacccgccgggacccgcucg

SEQ ID NO: 459 - RNA, 21 nt, Homo sapiens
uuccgcuucuccgaggacgcc

SEQ ID NO: 460 - RNA, 21 nt, Homo sapiens
uucggagccuggagcacaggg

SEQ ID NO: 461 - RNA, 21 nt, Homo sapiens
uuggugcauucgucgcugaac

SEQ ID NO: 462 - RNA, 20 nt, Homo sapiens
aauggcaguacuuuaggaca

SEQ ID NO: 463 - RNA, 20 nt, Homo sapiens
aauuguaguugcugccuagc

SEQ ID NO: 464 - RNA, 20 nt, Homo sapiens
accgaggaaugucggggucu

SEQ ID NO: 465 - RNA, 20 nt, Homo sapiens
agaacucauccaguccuugu

SEQ ID NO: 466 - RNA, 20 nt, Homo sapiens
agaggagacugggaggcagc

SEQ ID NO: 467 - RNA, 20 nt, Homo sapiens
agcacgcagaccgccgagga

SEQ ID NO: 468 - RNA, 20 nt, Homo sapiens
agcgaggguuccgccggcca

SEQ ID NO: 469 - RNA, 20 nt, Homo sapiens
agcgauguggccugggaacg

SEQ ID NO: 470 - RNA, 20 nt, Homo sapiens
auucccgggugccuggcaac

SEQ ID NO: 471 - RNA, 20 nt, Homo sapiens
cagcucggagcccggagcgu

SEQ ID NO: 472 - RNA, 20 nt, Homo sapiens
caguuuccguuacaagggua

SEQ ID NO: 473 - RNA, 20 nt, Homo sapiens
cauguggcuuuggugacuca

SEQ ID NO: 474 - RNA, 20 nt, Homo sapiens
cuccuagugcacuaaccuac

SEQ ID NO: 475 - RNA, 20 nt, Homo sapiens
cucucaaggaacucgcuguc

SEQ ID NO: 476 - RNA, 20 nt, Homo sapiens
ggcgcagcuggcugugagcg

SEQ ID NO: 477 - RNA, 20 nt, Homo sapiens
uccgguggugcccuggcggc

SEQ ID NO: 478 - RNA, 20 nt, Homo sapiens
uccuaaaguaccuggcaaag

SEQ ID NO: 479 - RNA, 20 nt, Homo sapiens
uggugaaugugcaauguuag

SEQ ID NO: 480 - RNA, 20 nt, Homo sapiens
uucgcugagcggcacggcua

SEQ ID NO: 481 - RNA, 20 nt, Homo sapiens
uuggcucaaacagguugacc

SEQ ID NO: 482 - RNA, 19 nt, Homo sapiens
aacaucugugggcgcugcc

SEQ ID NO: 483 - RNA, 19 nt, Homo sapiens
aaugucucauguuggaaag

SEQ ID NO: 484 - RNA, 19 nt, Homo sapiens
agaguuggaccagaaaagc

SEQ ID NO: 485 - RNA, 19 nt, Homo sapiens
aucgggagauuucuucauu

SEQ ID NO: 486 - RNA, 19 nt, Homo sapiens
cacggugcggcugcuucac

SEQ ID NO: 487 - RNA, 19 nt, Homo sapiens
caggaggcuggauggcuuc

SEQ ID NO: 488 - RNA, 19 nt, Homo sapiens
caggcucugcagaggugac

SEQ ID NO: 489 - RNA, 19 nt, Homo sapiens
caguuaggguacaagcuaa

SEQ ID NO: 490 - RNA, 19 nt, Homo sapiens
cugacacucgagggguuuc

SEQ ID NO: 491 - RNA, 19 nt, Homo sapiens
uugagugggaaaucacaag

SEQ ID NO: 492 - RNA, 18 nt, Homo sapiens
aaaacugugaaaaugaug

SEQ ID NO: 493 - RNA, 18 nt, Homo sapiens
aagaaaaaguuugccugc

SEQ ID NO: 494 - RNA, 18 nt, Homo sapiens
aagauuugccggggcauc

SEQ ID NO: 495 - RNA, 18 nt, Homo sapiens
agacagcugcgugugaga

SEQ ID NO: 496 - RNA, 18 nt, Homo sapiens
aggacucggccccaugga

SEQ ID NO: 497 - RNA, 18 nt, Homo sapiens
augauuucaggauagguu

SEQ ID NO: 498 - RNA, 18 nt, Homo sapiens
cagcuagacucucaaugg

SEQ ID NO: 499 - RNA, 18 nt, Homo sapiens
ccgagccucggcggcggc

SEQ ID NO: 500 - RNA, 18 nt, Homo sapiens
cucagucaacaaacacau

SEQ ID NO: 501 - RNA, 18 nt, Homo sapiens
cugggacagaccugcgug

SEQ ID NO: 502 - RNA, 18 nt, Homo sapiens
cugugugauaggaaaagc

SEQ ID NO: 503 - RNA, 18 nt, Homo sapiens
ugcaaggagauggaagaa

SEQ ID NO: 504 - RNA, 18 nt, Homo sapiens
uucuuugcugcggagaac

SEQ ID NO: 505 - RNA, 18 nt, Homo sapiens
uuuggaauugguagcaau

SEQ ID NO: 506 - RNA, 17 nt, Homo sapiens
agcggcagcggccgcag

SEQ ID NO: 507 - RNA, 17 nt, Homo sapiens
augaaagagagaaaauu

SEQ ID NO: 508 - RNA, 17 nt, Homo sapiens
augagagcuccacuguc

SEQ ID NO: 509 - RNA, 17 nt, Homo sapiens
auuggugcugcuuuuca

SEQ ID NO: 510 - RNA, 17 nt, Homo sapiens
cgaaguugaaauguuug

SEQ ID NO: 511 - RNA, 17 nt, Homo sapiens
cgaaugagaaggagcgg

SEQ ID NO: 512 - RNA, 17 nt, Homo sapiens
cuaagacauagggaaau

SEQ ID NO: 513 - RNA, 17 nt, Homo sapiens
cuucauaccacauuguc

SEQ ID NO: 514 - RNA, 17 nt, Homo sapiens
gugggggagaggcuguc

SEQ ID NO: 515 - RNA, 17 nt, Homo sapiens
ugagguaguagauuaga

SEQ ID NO: 516 - RNA, 16 nt, Homo sapiens
cccacguguagcuagu

SEQ ID NO: 517 - RNA, 16 nt, Homo sapiens
uugacaagaacaggac

SEQ ID NO: 518 - RNA, 15 nt, Homo sapiens
cucaguggcggcuuu

SEQ ID NO: 519 - RNA, 22 nt, Homo sapiens
aaaaagagugaguugagaggau

SEQ ID NO: 520 - RNA, 22 nt, Homo sapiens
aaaagauguaucuucucaaaua

SEQ ID NO: 521 - RNA, 22 nt, Homo sapiens
aaaucuugggauuccuggagug

SEQ ID NO: 522 - RNA, 22 nt, Homo sapiens
aaaugagagaaugugugaacga

SEQ ID NO: 523 - RNA, 22 nt, Homo sapiens
aacagaggacaacgcaacaagg

SEQ ID NO: 524 - RNA, 22 nt, Homo sapiens
aacguggacaucggauaguucu

SEQ ID NO: 525 - RNA, 22 nt, Homo sapiens
aacucccugagcgcucccucgu

SEQ ID NO: 526 - RNA, 22 nt, Homo sapiens
aacuggaagagaguuacacucu

SEQ ID NO: 527 - RNA, 22 nt, Homo sapiens
aagaaucuuaaccuaauaaaaa

SEQ ID NO: 528 - RNA, 22 nt, Homo sapiens
aagcaccgugaaaacggacugu

SEQ ID NO: 529 - RNA, 22 nt, Homo sapiens
aagccugcaggacagccagugu

SEQ ID NO: 530 - RNA, 22 nt, Homo sapiens
aagcucaaugaggacucauuag

SEQ ID NO: 531 - RNA, 22 nt, Homo sapiens
aaggaaaacuguguuuucagaa

SEQ ID NO: 532 - RNA, 22 nt, Homo sapiens
aaggccauccgagggcaccugg

SEQ ID NO: 533 - RNA, 22 nt, Homo sapiens
aagggugagcccuggugucggg

SEQ ID NO: 534 - RNA, 22 nt, Homo sapiens
aagucccaggcgggagcgucuu

SEQ ID NO: 535 - RNA, 22 nt, Homo sapiens
aagucggccaggaugucucagg

SEQ ID NO: 536 - RNA, 22 nt, Homo sapiens
aagucuguaggccuugucuguu

SEQ ID NO: 537 - RNA, 22 nt, Homo sapiens
aaugagcagugagacgacugga

SEQ ID NO: 538 - RNA, 22 nt, Homo sapiens
aaugucagauuuuugaauguua

SEQ ID NO: 539 - RNA, 22 nt, Homo sapiens
aauguguacagugaagugguuu

SEQ ID NO: 540 - RNA, 22 nt, Homo sapiens
accccgggcaggcacccccagg

SEQ ID NO: 541 - RNA, 22 nt, Homo sapiens
acccgccugcugcugggcggcg

SEQ ID NO: 542 - RNA, 22 nt, Homo sapiens
accuccuccacuucucccuuug

SEQ ID NO: 543 - RNA, 22 nt, Homo sapiens
accugagcuagaauacaaguag

SEQ ID NO: 544 - RNA, 22 nt, Homo sapiens
accuguucgugugcuccgacug

SEQ ID NO: 545 - RNA, 22 nt, Homo sapiens
acgcaccgcucggugcuggccg

SEQ ID NO: 546 - RNA, 22 nt, Homo sapiens
acggcagucacaggaacucagg

SEQ ID NO: 547 - RNA, 22 nt, Homo sapiens
acuacggggacgcugggccggg

SEQ ID NO: 548 - RNA, 22 nt, Homo sapiens
acuccuggugcugagauggacg

SEQ ID NO: 549 - RNA, 22 nt, Homo sapiens
acugaugccauccgaggaagau

SEQ ID NO: 550 - RNA, 22 nt, Homo sapiens
acugcagucuugaacuugcugg

SEQ ID NO: 551 - RNA, 22 nt, Homo sapiens
acuuuccugagcaaaucugaug

SEQ ID NO: 552 - RNA, 22 nt, Homo sapiens
agaaacuuuccaaagugcuuag

SEQ ID NO: 553 - RNA, 22 nt, Homo sapiens
agaacucagaccguaggugugg

SEQ ID NO: 554 - RNA, 22 nt, Homo sapiens
agacagggucugaaggacugga

SEQ ID NO: 555 - RNA, 22 nt, Homo sapiens
agauggaggcugcagugagccu

SEQ ID NO: 556 - RNA, 22 nt, Homo sapiens
agcaauggauguggucuacgcg

SEQ ID NO: 557 - RNA, 22 nt, Homo sapiens
agccccagaguagcugggauua

SEQ ID NO: 558 - RNA, 22 nt, Homo sapiens
agccccugccuuagagcucugg

SEQ ID NO: 559 - RNA, 22 nt, Homo sapiens
agcgguggugguuccgcgaugg

SEQ ID NO: 560 - RNA, 22 nt, Homo sapiens
aggaacagccugcuggcucaga

SEQ ID NO: 561 - RNA, 22 nt, Homo sapiens
aggaguuagcugugccaguggu

SEQ ID NO: 562 - RNA, 22 nt, Homo sapiens
aggccuggggcugccuccuggg

SEQ ID NO: 563 - RNA, 22 nt, Homo sapiens
aggguggggugggcauggggug

SEQ ID NO: 564 - RNA, 22 nt, Homo sapiens
aggugagcggcgaccgguaacu

SEQ ID NO: 565 - RNA, 22 nt, Homo sapiens
agguuacaagagcagauauucu

SEQ ID NO: 566 - RNA, 22 nt, Homo sapiens
agugacauucaucugcuggcua

SEQ ID NO: 567 - RNA, 22 nt, Homo sapiens
agugagccccugucucuguuuu

SEQ ID NO: 568 - RNA, 22 nt, Homo sapiens
agugcuuggacggaacccggcg

SEQ ID NO: 569 - RNA, 22 nt, Homo sapiens
auacggccugcagaaucgugag

SEQ ID NO: 570 - RNA, 22 nt, Homo sapiens
aucacauaugagugagaacaug

SEQ ID NO: 571 - RNA, 22 nt, Homo sapiens
aucagcagcauugaacagaaag

SEQ ID NO: 572 - RNA, 22 nt, Homo sapiens
auccgauauuccagaaggcaag

SEQ ID NO: 573 - RNA, 22 nt, Homo sapiens
auguccugcaguuaacacucaa

SEQ ID NO: 574 - RNA, 22 nt, Homo sapiens
auguguuagccauagcugaaaa

SEQ ID NO: 575 - RNA, 22 nt, Homo sapiens
auuagaggcgugagccgccgcg

SEQ ID NO: 576 - RNA, 22 nt, Homo sapiens
auuugcuugucuguaacggauu

SEQ ID NO: 577 - RNA, 22 nt, Homo sapiens
caagacuugagcaguguguagu

SEQ ID NO: 578 - RNA, 22 nt, Homo sapiens
caaggcgagggaccuggcccug

SEQ ID NO: 579 - RNA, 22 nt, Homo sapiens
caccugagcaagcuccuguuuu

SEQ ID NO: 580 - RNA, 22 nt, Homo sapiens
cacugggcccgagccugaacug

SEQ ID NO: 581 - RNA, 22 nt, Homo sapiens
cagcaguagucagccauccgga

SEQ ID NO: 582 - RNA, 22 nt, Homo sapiens
cagcgacuucugaagggccccu

SEQ ID NO: 583 - RNA, 22 nt, Homo sapiens
caggcaugagcugcugugucug

SEQ ID NO: 584 - RNA, 22 nt, Homo sapiens
caggcgacccggaagguuugcg

SEQ ID NO: 585 - RNA, 22 nt, Homo sapiens
cagugggcaggacacacacguu

SEQ ID NO: 586 - RNA, 22 nt, Homo sapiens
ccagggcaccaccgaggcccga

SEQ ID NO: 587 - RNA, 22 nt, Homo sapiens
cccgagcacgugcuggucaaga

SEQ ID NO: 588 - RNA, 22 nt, Homo sapiens
cccgggaggcagagguauuggu

SEQ ID NO: 589 - RNA, 22 nt, Homo sapiens
cccgugaggcagaaguuguagu

SEQ ID NO: 590 - RNA, 22 nt, Homo sapiens
cccuccgggacacugacgaggu

SEQ ID NO: 591 - RNA, 22 nt, Homo sapiens
cccugcagggcuuggccaaccg

SEQ ID NO: 592 - RNA, 22 nt, Homo sapiens
ccgugagaccaacgcagccaug

SEQ ID NO: 593 - RNA, 22 nt, Homo sapiens
ccucggaacaacuguauugcug

SEQ ID NO: 594 - RNA, 22 nt, Homo sapiens
ccuucaacaccucucuugguug

SEQ ID NO: 595 - RNA, 22 nt, Homo sapiens
cgacugcuggaagcugcaggga

SEQ ID NO: 596 - RNA, 22 nt, Homo sapiens
cgccuggggagccugccugggg

SEQ ID NO: 597 - RNA, 22 nt, Homo sapiens
cggccucgcuucccgcgccucg

SEQ ID NO: 598 - RNA, 22 nt, Homo sapiens
cggcgccucugugggcagacug

SEQ ID NO: 599 - RNA, 22 nt, Homo sapiens
cgggaguugggggcuagaguga

SEQ ID NO: 600 - RNA, 22 nt, Homo sapiens
cucacugccuccgguggcugcu

SEQ ID NO: 601 - RNA, 22 nt, Homo sapiens
cugagagucagagggaugggug

SEQ ID NO: 602 - RNA, 22 nt, Homo sapiens
cuggaggaccaaccccugcugu

SEQ ID NO: 603 - RNA, 22 nt, Homo sapiens
cuggcuacgaacuccucggggg

SEQ ID NO: 604 - RNA, 22 nt, Homo sapiens
cugggacgcaccuggggacagg

SEQ ID NO: 605 - RNA, 22 nt, Homo sapiens
cuggguccugcuggggcagggu

SEQ ID NO: 606 - RNA, 22 nt, Homo sapiens
cuggguuuugggggugcugacg

SEQ ID NO: 607 - RNA, 22 nt, Homo sapiens
cugugcagcaggccaaccgaga

SEQ ID NO: 608 - RNA, 22 nt, Homo sapiens
cuuugcucaugggcuggauggg

SEQ ID NO: 609 - RNA, 22 nt, Homo sapiens
cuuuuugauauuuguauugaua

SEQ ID NO: 610 - RNA, 22 nt, Homo sapiens
gaaauguuaaguaucaguuggu

SEQ ID NO: 611 - RNA, 22 nt, Homo sapiens
gagagcgagccgagccgagcug

SEQ ID NO: 612 - RNA, 22 nt, Homo sapiens
gagccagggagcgcuggaggaa

SEQ ID NO: 613 - RNA, 22 nt, Homo sapiens
gaguaucugcauccugcgcucu

SEQ ID NO: 614 - RNA, 22 nt, Homo sapiens
gauucuguggggccgugggagg

SEQ ID NO: 615 - RNA, 22 nt, Homo sapiens
gcaaaaaccuuaauuaccuuug

SEQ ID NO: 616 - RNA, 22 nt, Homo sapiens
gcagcgggcggcugcagcugug

SEQ ID NO: 617 - RNA, 22 nt, Homo sapiens
gcaggcccucacugucacuuua

SEQ ID NO: 618 - RNA, 22 nt, Homo sapiens
gcaggguauaaguggcucaaug

SEQ ID NO: 619 - RNA, 22 nt, Homo sapiens
gccccgagugcgggcgagccuu

SEQ ID NO: 620 - RNA, 22 nt, Homo sapiens
gccgcggcggcuccucugccgg

SEQ ID NO: 621 - RNA, 22 nt, Homo sapiens
gccgcugggccugagaggagcu

SEQ ID NO: 622 - RNA, 22 nt, Homo sapiens
gccugaauuucauaaaagaaag

SEQ ID NO: 623 - RNA, 22 nt, Homo sapiens
gcggaagcuccggaccucccug

SEQ ID NO: 624 - RNA, 22 nt, Homo sapiens
gcggcuuaagacgcucggcgau

SEQ ID NO: 625 - RNA, 22 nt, Homo sapiens
gcguuugggaugccaacgguaa

SEQ ID NO: 626 - RNA, 22 nt, Homo sapiens
gcugcagagccgguaacggugg

SEQ ID NO: 627 - RNA, 22 nt, Homo sapiens
ggagcagaagagccuuccuuug

SEQ ID NO: 628 - RNA, 22 nt, Homo sapiens
ggcgcggagcuaagcggcucgg

SEQ ID NO: 629 - RNA, 22 nt, Homo sapiens
ggcuuccgcugcccgugagcua

SEQ ID NO: 630 - RNA, 22 nt, Homo sapiens
gugaaguaguuggggccguaga

SEQ ID NO: 631 - RNA, 22 nt, Homo sapiens
guuucaucauguucggcaggcu

SEQ ID NO: 632 - RNA, 22 nt, Homo sapiens
ucacagugcuuguguucagaua

SEQ ID NO: 633 - RNA, 22 nt, Homo sapiens
uccagggugggaguaguucccu

SEQ ID NO: 634 - RNA, 22 nt, Homo sapiens
uccgcugggucaggcgcugacg

SEQ ID NO: 635 - RNA, 22 nt, Homo sapiens
uccggaggcgcuguuccagccu

SEQ ID NO: 636 - RNA, 22 nt, Homo sapiens
uccggcuggauggggccauucg

SEQ ID NO: 637 - RNA, 22 nt, Homo sapiens
ucgcagacagggacacauggag

SEQ ID NO: 638 - RNA, 22 nt, Homo sapiens
ucucuaccaaagcucaugugga

SEQ ID NO: 639 - RNA, 22 nt, Homo sapiens
ucucugucaggguacucagagg

SEQ ID NO: 640 - RNA, 22 nt, Homo sapiens
ucugcguggcggugaggccccg

SEQ ID NO: 641 - RNA, 22 nt, Homo sapiens
ucuucgcuuccagagcucugcg

SEQ ID NO: 642 - RNA, 22 nt, Homo sapiens
ugagccuugaagguccagaagg

SEQ ID NO: 643 - RNA, 22 nt, Homo sapiens
ugagggaugagaugcgagccuu

SEQ ID NO: 644 - RNA, 22 nt, Homo sapiens
ugcaucgccugcuccgcaaagg

SEQ ID NO: 645 - RNA, 22 nt, Homo sapiens
ugccaacggccacggaggccaa

SEQ ID NO: 646 - RNA, 22 nt, Homo sapiens
ugcgagcggcugcugagccggg

SEQ ID NO: 647 - RNA, 22 nt, Homo sapiens
ugcuggacggcccugugcugag

SEQ ID NO: 648 - RNA, 22 nt, Homo sapiens
ugcugggcagcuugguccugcu

SEQ ID NO: 649 - RNA, 22 nt, Homo sapiens
uggccggagcuggugccugcgg

SEQ ID NO: 650 - RNA, 22 nt, Homo sapiens
uggccggcugggucuccucccg

SEQ ID NO: 651 - RNA, 22 nt, Homo sapiens
uggcugggagucacugaugcug

SEQ ID NO: 652 - RNA, 22 nt, Homo sapiens
uguccgucauccugggcgucgu

SEQ ID NO: 653 - RNA, 22 nt, Homo sapiens
ugugccaccacaccuggcuuaa

SEQ ID NO: 654 - RNA, 22 nt, Homo sapiens
uuagccaauuguccaucuuuag

SEQ ID NO: 655 - RNA, 22 nt, Homo sapiens
uucaagguggcguccuuccgua

SEQ ID NO: 656 - RNA, 22 nt, Homo sapiens
uucgggcgcgugaccucggggu

SEQ ID NO: 657 - RNA, 22 nt, Homo sapiens
uucuaggcgagguccugccuag

SEQ ID NO: 658 - RNA, 22 nt, Homo sapiens
uucuccuggggcucagaguguu

SEQ ID NO: 659 - RNA, 22 nt, Homo sapiens
uucuucagcagaagagcugagg

SEQ ID NO: 660 - RNA, 22 nt, Homo sapiens
uucuuggagagaaauaauaaau

SEQ ID NO: 661 - RNA, 22 nt, Homo sapiens
uugaauuccuagcaaccuucau

SEQ ID NO: 662 - RNA, 22 nt, Homo sapiens
uugacauguugcucuccaaaag

SEQ ID NO: 663 - RNA, 22 nt, Homo sapiens
uugcacuggccugucccucagg

SEQ ID NO: 664 - RNA, 22 nt, Homo sapiens
uugcuuguuuaaacugcucaag

SEQ ID NO: 665 - RNA, 22 nt, Homo sapiens
uuggugugggcuccuacucuga

SEQ ID NO: 666 - RNA, 22 nt, Homo sapiens
uugucccuguucugggggaagg

SEQ ID NO: 667 - RNA, 22 nt, Homo sapiens
uuugcagacucacucugcaucu

SEQ ID NO: 668 - RNA, 22 nt, Homo sapiens
uuugccacuuguuggccgugga

SEQ ID NO: 669 - RNA, 21 nt, Homo sapiens
aaaacgagaaucuuaccaauu

SEQ ID NO: 670 - RNA, 21 nt, Homo sapiens
aaaggcgagguguccgcccgu

SEQ ID NO: 671 - RNA, 21 nt, Homo sapiens
aagaguuuacucugggaaaac

SEQ ID NO: 672 - RNA, 21 nt, Homo sapiens
aaggacugaccagggaccuuu

SEQ ID NO: 673 - RNA, 21 nt, Homo sapiens
aaggugaaacacaacucugua

SEQ ID NO: 674 - RNA, 21 nt, Homo sapiens
aaguaagggacacggccucuc

SEQ ID NO: 675 - RNA, 21 nt, Homo sapiens
aaguuccuaaagaaggcauuc

SEQ ID NO: 676 - RNA, 21 nt, Homo sapiens
aauaauuuggcauucuuuaag

SEQ ID NO: 677 - RNA, 21 nt, Homo sapiens
aauaugcaggagggauuucca

SEQ ID NO: 678 - RNA, 21 nt, Homo sapiens
aaugcccucgugaggccucaa

SEQ ID NO: 679 - RNA, 21 nt, Homo sapiens
acaaaugccuccugugcuuug

SEQ ID NO: 680 - RNA, 21 nt, Homo sapiens
acagccaggguauccaggaug

SEQ ID NO: 681 - RNA, 21 nt, Homo sapiens
acgacgaugucugagcagaau

SEQ ID NO: 682 - RNA, 21 nt, Homo sapiens
acugauaccuuggaggcauuu

SEQ ID NO: 683 - RNA, 21 nt, Homo sapiens
acugcccuggcacccagcaca

SEQ ID NO: 684 - RNA, 21 nt, Homo sapiens
agacuguacgcuaagggucau

SEQ ID NO: 685 - RNA, 21 nt, Homo sapiens
agagcccaucuccucaggacu

SEQ ID NO: 686 - RNA, 21 nt, Homo sapiens
agaggggcaauggcugcuuuc

SEQ ID NO: 687 - RNA, 21 nt, Homo sapiens
agccucugcccugggcggugu

SEQ ID NO: 688 - RNA, 21 nt, Homo sapiens
agcgaggucucggcuuuccgc

SEQ ID NO: 689 - RNA, 21 nt, Homo sapiens
aggacaggcugcugagcacca

SEQ ID NO: 690 - RNA, 21 nt, Homo sapiens
aggacuuguuccugugggcuu

SEQ ID NO: 691 - RNA, 21 nt, Homo sapiens
aggagucuugccauguugccc

SEQ ID NO: 692 - RNA, 21 nt, Homo sapiens
aggccugcucugggccgcccu

SEQ ID NO: 693 - RNA, 21 nt, Homo sapiens
aggcggacuaugacuuaguug

SEQ ID NO: 694 - RNA, 21 nt, Homo sapiens
agggcccgggggaggcggcgg

SEQ ID NO: 695 - RNA, 21 nt, Homo sapiens
agguuaugggcucuacauugu

SEQ ID NO: 696 - RNA, 21 nt, Homo sapiens
agucagggaggcgaacugcug

SEQ ID NO: 697 - RNA, 21 nt, Homo sapiens
aguccagggguuaaagcacca

SEQ ID NO: 698 - RNA, 21 nt, Homo sapiens
agugaacagauaguguuaauu

SEQ ID NO: 699 - RNA, 21 nt, Homo sapiens
aucugggaccacgggcacucu

SEQ ID NO: 700 - RNA, 21 nt, Homo sapiens
auguuaaguuucuacuaugug

SEQ ID NO: 701 - RNA, 21 nt, Homo sapiens
auugggguggaugccucugcu

SEQ ID NO: 702 - RNA, 21 nt, Homo sapiens
caaaaguacuugcggauuuug

SEQ ID NO: 703 - RNA, 21 nt, Homo sapiens
caacagacaccagccuguggu

SEQ ID NO: 704 - RNA, 21 nt, Homo sapiens
caccggggacaauggugacua

SEQ ID NO: 705 - RNA, 21 nt, Homo sapiens
cacgaugagucccuggggguu

SEQ ID NO: 706 - RNA, 21 nt, Homo sapiens
cauagggucugugggaaaugg

SEQ ID NO: 707 - RNA, 21 nt, Homo sapiens
cauugagugucugcagcucuu

SEQ ID NO: 708 - RNA, 21 nt, Homo sapiens
ccccuccaucguggggcgccc

SEQ ID NO: 709 - RNA, 21 nt, Homo sapiens
ccgagugaugcuuggggagac

SEQ ID NO: 710 - RNA, 21 nt, Homo sapiens
ccgauaauuugguggcggcgu

SEQ ID NO: 711 - RNA, 21 nt, Homo sapiens
ccgccgcccaacuugaagccu

SEQ ID NO: 712 - RNA, 21 nt, Homo sapiens
ccugacucagcaugagccugg

SEQ ID NO: 713 - RNA, 21 nt, Homo sapiens
cgcccggcagggaggcggcgg

SEQ ID NO: 714 - RNA, 21 nt, Homo sapiens
cgcucaggcccguggcgccga

SEQ ID NO: 715 - RNA, 21 nt, Homo sapiens
cgggcggcuggccucaccgcc

SEQ ID NO: 716 - RNA, 21 nt, Homo sapiens
cggggugguggggggcgggga

SEQ ID NO: 717 - RNA, 21 nt, Homo sapiens
cgugcugcgcuugcagugagc

SEQ ID NO: 718 - RNA, 21 nt, Homo sapiens
cugcgggggucccggccucug

SEQ ID NO: 719 - RNA, 21 nt, Homo sapiens
cuggcgcacccguccgagucc

SEQ ID NO: 720 - RNA, 21 nt, Homo sapiens
cugggaguuccaggcucagag

SEQ ID NO: 721 - RNA, 21 nt, Homo sapiens
gagcugcuguugccacauguc

SEQ ID NO: 722 - RNA, 21 nt, Homo sapiens
gccgcccugcugcggcggggc

SEQ ID NO: 723 - RNA, 21 nt, Homo sapiens
gcgaagcccugggcugcccug

SEQ ID NO: 724 - RNA, 21 nt, Homo sapiens
gcgggcaauggccgccugggu

SEQ ID NO: 725 - RNA, 21 nt, Homo sapiens
ggagccccccuggggaggcgg

SEQ ID NO: 726 - RNA, 21 nt, Homo sapiens
ggcagauuccuggcagcugcc

SEQ ID NO: 727 - RNA, 21 nt, Homo sapiens
ggcgccuccagcagcagcucg

SEQ ID NO: 728 - RNA, 21 nt, Homo sapiens
gggccguggaagguggccagg

SEQ ID NO: 729 - RNA, 21 nt, Homo sapiens
ggggcucaugagcaggggaag

SEQ ID NO: 730 - RNA, 21 nt, Homo sapiens
gucccaggcccggccggugcg

SEQ ID NO: 731 - RNA, 21 nt, Homo sapiens
guggcucuggggaaccugggu

SEQ ID NO: 732 - RNA, 21 nt, Homo sapiens
guggguggcccccuguggugu

SEQ ID NO: 733 - RNA, 21 nt, Homo sapiens
uacacacaucccugucuuaca

SEQ ID NO: 734 - RNA, 21 nt, Homo sapiens
ucagaggccgccaucaaccgc

SEQ ID NO: 735 - RNA, 21 nt, Homo sapiens
ucccuugcugugcccuccacc

SEQ ID NO: 736 - RNA, 21 nt, Homo sapiens
uccucuuccuggugcugggcu

SEQ ID NO: 737 - RNA, 21 nt, Homo sapiens
ucucucugccugggauuccuc

SEQ ID NO: 738 - RNA, 21 nt, Homo sapiens
ucugcccugaguccugcaaga

SEQ ID NO: 739 - RNA, 21 nt, Homo sapiens
ucugggauacugcugugucuc

SEQ ID NO: 740 - RNA, 21 nt, Homo sapiens
ucuuuuccucaccucguauug

SEQ ID NO: 741 - RNA, 21 nt, Homo sapiens
ugagucaaugauucgggugca

SEQ ID NO: 742 - RNA, 21 nt, Homo sapiens
ugcagauucuugggccucacc

SEQ ID NO: 743 - RNA, 21 nt, Homo sapiens
ugcggucgccgcgagccucgg

SEQ ID NO: 744 - RNA, 21 nt, Homo sapiens
ugcucggcgagccucccucua

SEQ ID NO: 745 - RNA, 21 nt, Homo sapiens
uggaagagguggcccagaggu

SEQ ID NO: 746 - RNA, 21 nt, Homo sapiens
uggagcugcucuccuggccuc

SEQ ID NO: 747 - RNA, 21 nt, Homo sapiens
uggauugccagaaaugagaga

SEQ ID NO: 748 - RNA, 21 nt, Homo sapiens
uggcaggugagccugagaguc

SEQ ID NO: 749 - RNA, 21 nt, Homo sapiens
ugugcgcagggagaccucucc

SEQ ID NO: 750 - RNA, 21 nt, Homo sapiens
uucucaguccucgaguccuac

SEQ ID NO: 751 - RNA, 21 nt, Homo sapiens
uucuugcugccccuucucugg

SEQ ID NO: 752 - RNA, 21 nt, Homo sapiens
uugccacacugcaacaccuua

SEQ ID NO: 753 - RNA, 21 nt, Homo sapiens
uugggcaggucccaggcauuc

SEQ ID NO: 754 - RNA, 21 nt, Homo sapiens
uugggcccgacggcaccggcc

SEQ ID NO: 755 - RNA, 20 nt, Homo sapiens
aaacaaaugccuacauguga

SEQ ID NO: 756 - RNA, 20 nt, Homo sapiens
aaagcauuuacuuuuuugac

SEQ ID NO: 757 - RNA, 20 nt, Homo sapiens
aacguucugauagaaaugac

SEQ ID NO: 758 - RNA, 20 nt, Homo sapiens
aagccagugggacucagcua

SEQ ID NO: 759 - RNA, 20 nt, Homo sapiens
aagcgaagugugguggcuuc

SEQ ID NO: 760 - RNA, 20 nt, Homo sapiens
aauagguucucuguaaaaca

SEQ ID NO: 761 - RNA, 20 nt, Homo sapiens
aaugaagcuggugugaccuu

SEQ ID NO: 762 - RNA, 20 nt, Homo sapiens
aaugcuuguuggauucauga

SEQ ID NO: 763 - RNA, 20 nt, Homo sapiens
acuugcuagagaaucuguuu

SEQ ID NO: 764 - RNA, 20 nt, Homo sapiens
agaaugcacucaagacaacc

SEQ ID NO: 765 - RNA, 20 nt, Homo sapiens
agagaccgugaagauuccaa

SEQ ID NO: 766 - RNA, 20 nt, Homo sapiens
agauuugaaaacacaugcau

SEQ ID NO: 767 - RNA, 20 nt, Homo sapiens
agcaaggaugauucugauuu

SEQ ID NO: 768 - RNA, 20 nt, Homo sapiens
agccauguggaacugcaaau

SEQ ID NO: 769 - RNA, 20 nt, Homo sapiens
agccugcgugagcuggaccu

SEQ ID NO: 770 - RNA, 20 nt, Homo sapiens
aggaagcugaaggagaaaag

SEQ ID NO: 771 - RNA, 20 nt, Homo sapiens
aggagaagcaagcaggcgaa

SEQ ID NO: 772 - RNA, 20 nt, Homo sapiens
agguguucgacaauggcagc

SEQ ID NO: 773 - RNA, 20 nt, Homo sapiens
agguuccuuugguaucaucc

SEQ ID NO: 774 - RNA, 20 nt, Homo sapiens
agucccuguggaggaccugc

SEQ ID NO: 775 - RNA, 20 nt, Homo sapiens
agugggauguugaaguuucc

SEQ ID NO: 776 - RNA, 20 nt, Homo sapiens
aguuggggauuccaucauuu

SEQ ID NO: 777 - RNA, 20 nt, Homo sapiens
aucauaaucggaggcuuugg

SEQ ID NO: 778 - RNA, 20 nt, Homo sapiens
augcuuuguaagaaucguua

SEQ ID NO: 779 - RNA, 20 nt, Homo sapiens
augggggaacugguuccagc

SEQ ID NO: 780 - RNA, 20 nt, Homo sapiens
auugcucuaaaauuucuaau

SEQ ID NO: 781 - RNA, 20 nt, Homo sapiens
cacaccuacaguggacuacc

SEQ ID NO: 782 - RNA, 20 nt, Homo sapiens
caggcaaggaagaugcugcc

SEQ ID NO: 783 - RNA, 20 nt, Homo sapiens
caggccugggcuccaccugc

SEQ ID NO: 784 - RNA, 20 nt, Homo sapiens
cagucuggcuaaagguuugu

SEQ ID NO: 785 - RNA, 20 nt, Homo sapiens
cccugcaggcguccacacau

SEQ ID NO: 786 - RNA, 20 nt, Homo sapiens
cgccacuagccgggcauggc

SEQ ID NO: 787 - RNA, 20 nt, Homo sapiens
cggaaggaacucauggcucu

SEQ ID NO: 788 - RNA, 20 nt, Homo sapiens
cggcagcagcagcagcugag

SEQ ID NO: 789 - RNA, 20 nt, Homo sapiens
cggggugucccggcgaccca

SEQ ID NO: 790 - RNA, 20 nt, Homo sapiens
cucuccugaccgugggggcc

SEQ ID NO: 791 - RNA, 20 nt, Homo sapiens
gacuuacaggugcgugccac

SEQ ID NO: 792 - RNA, 20 nt, Homo sapiens
gagcacagcuggccgugguu

SEQ ID NO: 793 - RNA, 20 nt, Homo sapiens
gagcccgcagggcagcguca

SEQ ID NO: 794 - RNA, 20 nt, Homo sapiens
gaggcccaaggucacggugu

SEQ ID NO: 795 - RNA, 20 nt, Homo sapiens
gauuuacggccgcaggugcg

SEQ ID NO: 796 - RNA, 20 nt, Homo sapiens
gccagggagcuugcaggaag

SEQ ID NO: 797 - RNA, 20 nt, Homo sapiens
gcuuuggcaaaccaaguuuc

SEQ ID NO: 798 - RNA, 20 nt, Homo sapiens
gguggcccgauucagcucuc

SEQ ID NO: 799 - RNA, 20 nt, Homo sapiens
gucauaauccugacccugag

SEQ ID NO: 800 - RNA, 20 nt, Homo sapiens
uaaauccucccggccgcuca

SEQ ID NO: 801 - RNA, 20 nt, Homo sapiens
uagucugggagcagacagag

SEQ ID NO: 802 - RNA, 20 nt, Homo sapiens
uccauuugcugagcauacuu

SEQ ID NO: 803 - RNA, 20 nt, Homo sapiens
ugcagacagggcaaagaaaa

SEQ ID NO: 804 - RNA, 20 nt, Homo sapiens
ugccccuucgcuccugccug

SEQ ID NO: 805 - RNA, 20 nt, Homo sapiens
uggcaagggcauccuggcug

SEQ ID NO: 806 - RNA, 20 nt, Homo sapiens
uggccgcucucgggacuccc

SEQ ID NO: 807 - RNA, 20 nt, Homo sapiens
ugggcacccgcgacgacgag

SEQ ID NO: 808 - RNA, 20 nt, Homo sapiens
uugcuaacccugccuuccca

SEQ ID NO: 809 - RNA, 20 nt, Homo sapiens
uuggaaucccuguugcuaca

SEQ ID NO: 810 - RNA, 20 nt, Homo sapiens
uuguccggagaguauauugu

SEQ ID NO: 811 - RNA, 20 nt, Homo sapiens
uuuggacccagcagaaagca

SEQ ID NO: 812 - RNA, 19 nt, Homo sapiens
aaagaccucagaagcacuc

SEQ ID NO: 813 - RNA, 19 nt, Homo sapiens
aaggcccgcagccucuuug

SEQ ID NO: 814 - RNA, 19 nt, Homo sapiens
aaguauuguugcuuugaaa

SEQ ID NO: 815 - RNA, 19 nt, Homo sapiens
acuuugccaaagcugucau

SEQ ID NO: 816 - RNA, 19 nt, Homo sapiens
agaagaagauggucagccu

SEQ ID NO: 817 - RNA, 19 nt, Homo sapiens
agaccucaucacaacagag

SEQ ID NO: 818 - RNA, 19 nt, Homo sapiens
aggccaagccaggcgucug

SEQ ID NO: 819 - RNA, 19 nt, Homo sapiens
agugcgcaguaugaggacc

SEQ ID NO: 820 - RNA, 19 nt, Homo sapiens
cacaaccacuugggacaga

SEQ ID NO: 821 - RNA, 19 nt, Homo sapiens
cagaggcugggauggguag

SEQ ID NO: 822 - RNA, 19 nt, Homo sapiens
cgcuauucucugcugcagu

SEQ ID NO: 823 - RNA, 19 nt, Homo sapiens
cucagcaucuggugagggc

SEQ ID NO: 824 - RNA, 19 nt, Homo sapiens
cugggcuacauguggccug

SEQ ID NO: 825 - RNA, 19 nt, Homo sapiens
gaaaaugcugagucagaau

SEQ ID NO: 826 - RNA, 19 nt, Homo sapiens
gaaagagaaaugaaggaaa

SEQ ID NO: 827 - RNA, 19 nt, Homo sapiens
gacugaaugccauuugucc

SEQ ID NO: 828 - RNA, 19 nt, Homo sapiens
gggaaaugcugcaaagaau

SEQ ID NO: 829 - RNA, 19 nt, Homo sapiens
uccgacuugccauggucgu

SEQ ID NO: 830 - RNA, 19 nt, Homo sapiens
ucuugcacagcacugcuaa

SEQ ID NO: 831 - RNA, 19 nt, Homo sapiens
uggacaucgaggcgcugaa

SEQ ID NO: 832 - RNA, 19 nt, Homo sapiens
uguugccagugucugucug

SEQ ID NO: 833 - RNA, 19 nt, Homo sapiens
uuccgcgacuaccggcgug

SEQ ID NO: 834 - RNA, 19 nt, Homo sapiens
uugcagugggugccaccca

SEQ ID NO: 835 - RNA, 18 nt, Homo sapiens
aaaaaugcucauugaaaa

SEQ ID NO: 836 - RNA, 18 nt, Homo sapiens
aaagaaucaccagugcau

SEQ ID NO: 837 - RNA, 18 nt, Homo sapiens
aacaaccacuguggaugu

SEQ ID NO: 838 - RNA, 18 nt, Homo sapiens
aacccagggaacugaaac

SEQ ID NO: 839 - RNA, 18 nt, Homo sapiens
aacugccuaugauucuuu

SEQ ID NO: 840 - RNA, 18 nt, Homo sapiens
aaguugauugaauguugu

SEQ ID NO: 841 - RNA, 18 nt, Homo sapiens
accaggcuccugcagacc

SEQ ID NO: 842 - RNA, 18 nt, Homo sapiens
acuuauggguugcugaaa

SEQ ID NO: 843 - RNA, 18 nt, Homo sapiens
agacauggcaacuuccug

SEQ ID NO: 844 - RNA, 18 nt, Homo sapiens
agagagaggcacccugga

SEQ ID NO: 845 - RNA, 18 nt, Homo sapiens
aggacuuuggucgagcgg

SEQ ID NO: 846 - RNA, 18 nt, Homo sapiens
aguccuuccuccccugcc

SEQ ID NO: 847 - RNA, 18 nt, Homo sapiens
aguugaccagugcagagc

SEQ ID NO: 848 - RNA, 18 nt, Homo sapiens
auccugaugcuucaaaac

SEQ ID NO: 849 - RNA, 18 nt, Homo sapiens
augaauguggugcauuac

SEQ ID NO: 850 - RNA, 18 nt, Homo sapiens
augcacagccauggggca

SEQ ID NO: 851 - RNA, 18 nt, Homo sapiens
augggcuauggaguugag

SEQ ID NO: 852 - RNA, 18 nt, Homo sapiens
auuaaacuuucucuuuuc

SEQ ID NO: 853 - RNA, 18 nt, Homo sapiens
auuccagagugcugaggc

SEQ ID NO: 854 - RNA, 18 nt, Homo sapiens
cagagcuuugggauguca

SEQ ID NO: 855 - RNA, 18 nt, Homo sapiens
cagcaccucuagugacca

SEQ ID NO: 856 - RNA, 18 nt, Homo sapiens
cagcuugggaagaaugag

SEQ ID NO: 857 - RNA, 18 nt, Homo sapiens
cccgccauguucugugug

SEQ ID NO: 858 - RNA, 18 nt, Homo sapiens
cgcccggcgccggagucc

SEQ ID NO: 859 - RNA, 18 nt, Homo sapiens
cggaccaaaacugcagag

SEQ ID NO: 860 - RNA, 18 nt, Homo sapiens
cucaacucugugaugugg

SEQ ID NO: 861 - RNA, 18 nt, Homo sapiens
cugacggugcaggagggu

SEQ ID NO: 862 - RNA, 18 nt, Homo sapiens
cugccugcuccugccucu

SEQ ID NO: 863 - RNA, 18 nt, Homo sapiens
cuucucuuccuggcaggc

SEQ ID NO: 864 - RNA, 18 nt, Homo sapiens
gaaccagcugcuaggccc

SEQ ID NO: 865 - RNA, 18 nt, Homo sapiens
gacgugggugucccugag

SEQ ID NO: 866 - RNA, 18 nt, Homo sapiens
gagccgggcucaccaggu

SEQ ID NO: 867 - RNA, 18 nt, Homo sapiens
gcaggagggcuggggaag

SEQ ID NO: 868 - RNA, 18 nt, Homo sapiens
gcauuggagucaggcaga

SEQ ID NO: 869 - RNA, 18 nt, Homo sapiens
gccauuuugagagcgagc

SEQ ID NO: 870 - RNA, 18 nt, Homo sapiens
gcggcggcgcgaggaggc

SEQ ID NO: 871 - RNA, 18 nt, Homo sapiens
gugacucagcauccucaa

SEQ ID NO: 872 - RNA, 18 nt, Homo sapiens
gugcgagagcuggacgga

SEQ ID NO: 873 - RNA, 18 nt, Homo sapiens
uacccuugauguuuccuc

SEQ ID NO: 874 - RNA, 18 nt, Homo sapiens
ucauccaggcagagaggc

SEQ ID NO: 875 - RNA, 18 nt, Homo sapiens
ucugcccucuuaagcagc

SEQ ID NO: 876 - RNA, 18 nt, Homo sapiens
ucuuugugcugcaguggu

SEQ ID NO: 877 - RNA, 18 nt, Homo sapiens
ugggccuauuucuccuga

SEQ ID NO: 878 - RNA, 18 nt, Homo sapiens
uuaaagcgcugauuagaa

SEQ ID NO: 879 - RNA, 18 nt, Homo sapiens
uuagaagauggugcuauc

SEQ ID NO: 880 - RNA, 18 nt, Homo sapiens
uuagagacggggucuuuc

SEQ ID NO: 881 - RNA, 18 nt, Homo sapiens
uucgucuuuggucacagc

SEQ ID NO: 882 - RNA, 18 nt, Homo sapiens
uucuggcucaagggcuau

SEQ ID NO: 883 - RNA, 18 nt, Homo sapiens
uucuuccugcaucccgug

SEQ ID NO: 884 - RNA, 18 nt, Homo sapiens
uugccucuaauccugaug

SEQ ID NO: 885 - RNA, 18 nt, Homo sapiens
uuugcagauggugaagag

SEQ ID NO: 886 - RNA, 17 nt, Homo sapiens
aaacaaauuuuaugugu

SEQ ID NO: 887 - RNA, 17 nt, Homo sapiens
aaacaucugcaagaauu

SEQ ID NO: 888 - RNA, 17 nt, Homo sapiens
aaauuaguuugggaaac

SEQ ID NO: 889 - RNA, 17 nt, Homo sapiens
aaccagggcuaucucuc

SEQ ID NO: 890 - RNA, 17 nt, Homo sapiens
aacuaucggggcucugc

SEQ ID NO: 891 - RNA, 17 nt, Homo sapiens
aagaugaagcaagaugc

SEQ ID NO: 892 - RNA, 17 nt, Homo sapiens
aagcaacugugggcgac

SEQ ID NO: 893 - RNA, 17 nt, Homo sapiens
acagaaaucucauguag

SEQ ID NO: 894 - RNA, 17 nt, Homo sapiens
accagggcuggagcuug

SEQ ID NO: 895 - RNA, 17 nt, Homo sapiens
agaaaccagugagaggu

SEQ ID NO: 896 - RNA, 17 nt, Homo sapiens
agaagacucuguucauc

SEQ ID NO: 897 - RNA, 17 nt, Homo sapiens
agaagagaacucggaag

SEQ ID NO: 898 - RNA, 17 nt, Homo sapiens
agcuggaagauggccgc

SEQ ID NO: 899 - RNA, 17 nt, Homo sapiens
agggguaaugccacuug

SEQ ID NO: 900 - RNA, 17 nt, Homo sapiens
augcuacauggaaaauc

SEQ ID NO: 901 - RNA, 17 nt, Homo sapiens
auucuuucugggauaaa

SEQ ID NO: 902 - RNA, 17 nt, Homo sapiens
auuggucagacauccug

SEQ ID NO: 903 - RNA, 17 nt, Homo sapiens
cagcugcacugauguug

SEQ ID NO: 904 - RNA, 17 nt, Homo sapiens
caggcccugugcacccu

SEQ ID NO: 905 - RNA, 17 nt, Homo sapiens
cggcggcgggagaagac

SEQ ID NO: 906 - RNA, 17 nt, Homo sapiens
cucuguugaccaucuuc

SEQ ID NO: 907 - RNA, 17 nt, Homo sapiens
cugguucggauauuugg

SEQ ID NO: 908 - RNA, 17 nt, Homo sapiens
cuugaagugucaggagc

SEQ ID NO: 909 - RNA, 17 nt, Homo sapiens
gcaaggcgaagcugaga

SEQ ID NO: 910 - RNA, 17 nt, Homo sapiens
gccuuguucuguuuaaa

SEQ ID NO: 911 - RNA, 17 nt, Homo sapiens
gguaguauuguacaguu

SEQ ID NO: 912 - RNA, 17 nt, Homo sapiens
uggucccuguucaacac

SEQ ID NO: 913 - RNA, 17 nt, Homo sapiens
ugugaaaugugcagaua

SEQ ID NO: 914 - RNA, 17 nt, Homo sapiens
uuguccugggcgaaugg

SEQ ID NO: 915 - RNA, 16 nt, Homo sapiens
aaugccugugagccag

SEQ ID NO: 916 - RNA, 16 nt, Homo sapiens
acaauguucuggcaca

SEQ ID NO: 917 - RNA, 16 nt, Homo sapiens
accccauaaacaccaa

SEQ ID NO: 918 - RNA, 16 nt, Homo sapiens
acccucagccaguggg

SEQ ID NO: 919 - RNA, 16 nt, Homo sapiens
agagacugagcuauaa

SEQ ID NO: 920 - RNA, 16 nt, Homo sapiens
aggcccuggagagaau

SEQ ID NO: 921 - RNA, 16 nt, Homo sapiens
aucaucuggcucaguu

SEQ ID NO: 922 - RNA, 16 nt, Homo sapiens
cacugcccaggcgacg

SEQ ID NO: 923 - RNA, 16 nt, Homo sapiens
cagcgugcugacagug

SEQ ID NO: 924 - RNA, 16 nt, Homo sapiens
cccucucuccgccagg

SEQ ID NO: 925 - RNA, 16 nt, Homo sapiens
cggcaggcagcaagga

SEQ ID NO: 926 - RNA, 16 nt, Homo sapiens
cggugguucuguaugg

SEQ ID NO: 927 - RNA, 16 nt, Homo sapiens
cuaacaggugcaggcu

SEQ ID NO: 928 - RNA, 16 nt, Homo sapiens
cucauaguccuagcca

SEQ ID NO: 929 - RNA, 16 nt, Homo sapiens
cuggcucaggaugaac

SEQ ID NO: 930 - RNA, 16 nt, Homo sapiens
cugguggagucagggg

SEQ ID NO: 931 - RNA, 16 nt, Homo sapiens
cugucaaggcugcuuu

SEQ ID NO: 932 - RNA, 16 nt, Homo sapiens
gaaacugugggcuugg

SEQ ID NO: 933 - RNA, 16 nt, Homo sapiens
gcuccaggggcaaagg

SEQ ID NO: 934 - RNA, 16 nt, Homo sapiens
gggcgcgguacucagc

SEQ ID NO: 935 - RNA, 16 nt, Homo sapiens
gucaagacugccagcc

SEQ ID NO: 936 - RNA, 16 nt, Homo sapiens
guuacacuucccagaa

SEQ ID NO: 937 - RNA, 16 nt, Homo sapiens
uggcuucugagacagc

SEQ ID NO: 938 - RNA, 16 nt, Homo sapiens
uugcacaugacaucaa

SEQ ID NO: 939 - RNA, 15 nt, Homo sapiens
cuccgcgucccccga

SEQ ID NO: 940 - RNA, 15 nt, Homo sapiens
cugagugcgagcucc

SEQ ID NO: 941 - RNA, 15 nt, Homo sapiens
gauguggugacgucg

SEQ ID NO: 942 - RNA, 15 nt, Homo sapiens
uaccccaucugaaau

SEQ ID NO: 943 - RNA, 15 nt, Homo sapiens
ucuugggucgaacau

SEQ ID NO: 944 - RNA, 22 nt, Homo sapiens
aaaacauccuugccucagaggg

SEQ ID NO: 945 - RNA, 22 nt, Homo sapiens
aaacaacaauuaccugauuuau

SEQ ID NO: 946 - RNA, 22 nt, Homo sapiens
aaacugugguuugcuccacaga

SEQ ID NO: 947 - RNA, 22 nt, Homo sapiens
aaaguugugucaucugcaaaaa

SEQ ID NO: 948 - RNA, 22 nt, Homo sapiens
aaaugagcaacagcaagggaaa

SEQ ID NO: 949 - RNA, 22 nt, Homo sapiens
aaauguaauugcgguuuuugcu

SEQ ID NO: 950 - RNA, 22 nt, Homo sapiens
aacaaauccuggaccaccugaa

SEQ ID NO: 951 - RNA, 22 nt, Homo sapiens
aacuccccuggagauaaguaag

SEQ ID NO: 952 - RNA, 22 nt, Homo sapiens
aacuggauuguuugucacacaa

SEQ ID NO: 953 - RNA, 22 nt, Homo sapiens
aagcagggaggcaaagcucgcg

SEQ ID NO: 954 - RNA, 22 nt, Homo sapiens
aagcggcuucagcagcuagcgg

SEQ ID NO: 955 - RNA, 22 nt, Homo sapiens
aaggccaugucacugggccuug

SEQ ID NO: 956 - RNA, 22 nt, Homo sapiens
aaggccugauaauacacaaaau

SEQ ID NO: 957 - RNA, 22 nt, Homo sapiens
aaggcucgaagccgugugcggg

SEQ ID NO: 958 - RNA, 22 nt, Homo sapiens
aaggcuuuggcagaggccuaaa

SEQ ID NO: 959 - RNA, 22 nt, Homo sapiens
aaugaaagguccuauuuguuaa

SEQ ID NO: 960 - RNA, 22 nt, Homo sapiens
aaugcacugauguuuucauaau

SEQ ID NO: 961 - RNA, 22 nt, Homo sapiens
acagcuucucuauguguggauu

SEQ ID NO: 962 - RNA, 22 nt, Homo sapiens
accagucagaccgauaugucaa

SEQ ID NO: 963 - RNA, 22 nt, Homo sapiens
accaguccucgcauguggacga

SEQ ID NO: 964 - RNA, 22 nt, Homo sapiens
accaugcuaggccacuugcugg

SEQ ID NO: 965 - RNA, 22 nt, Homo sapiens
accuuccugggggccuuggcuu

SEQ ID NO: 966 - RNA, 22 nt, Homo sapiens
acgcauuccguaugaugauuau

SEQ ID NO: 967 - RNA, 22 nt, Homo sapiens
acggcaucgucaccaacuggga

SEQ ID NO: 968 - RNA, 22 nt, Homo sapiens
agaagggguccuggugacgagu

SEQ ID NO: 969 - RNA, 22 nt, Homo sapiens
agagaaucaaaugcuaacgaaa

SEQ ID NO: 970 - RNA, 22 nt, Homo sapiens
agaggcuuugugcggauacggg

SEQ ID NO: 971 - RNA, 22 nt, Homo sapiens
agaggugaaguccccaguggag

SEQ ID NO: 972 - RNA, 22 nt, Homo sapiens
agaguguucagccagagauauu

SEQ ID NO: 973 - RNA, 22 nt, Homo sapiens
agccguggcccggcggccuggg

SEQ ID NO: 974 - RNA, 22 nt, Homo sapiens
agcgcggccggcgcuccagcgg

SEQ ID NO: 975 - RNA, 22 nt, Homo sapiens
aggagaccgggugaugguguug

SEQ ID NO: 976 - RNA, 22 nt, Homo sapiens
aggcccccgcugccuguccgcg

SEQ ID NO: 977 - RNA, 22 nt, Homo sapiens
aggcugcgggcggccggcuagg

SEQ ID NO: 978 - RNA, 22 nt, Homo sapiens
agggcuccaggcguccccgaau

SEQ ID NO: 979 - RNA, 22 nt, Homo sapiens
agggggagcgggaggggaggga

SEQ ID NO: 980 - RNA, 22 nt, Homo sapiens
aggucgcuguccccgugguagg

SEQ ID NO: 981 - RNA, 22 nt, Homo sapiens
aguagccaguauuucugauuaa

SEQ ID NO: 982 - RNA, 22 nt, Homo sapiens
agugccccgagugcuggcacug

SEQ ID NO: 983 - RNA, 22 nt, Homo sapiens
agugucccgggcccguugagga

SEQ ID NO: 984 - RNA, 22 nt, Homo sapiens
aguuccuugccugugaacgggg

SEQ ID NO: 985 - RNA, 22 nt, Homo sapiens
auaccuggguaaaggaaaugaa

SEQ ID NO: 986 - RNA, 22 nt, Homo sapiens
aucacugagccaggagcugugg

SEQ ID NO: 987 - RNA, 22 nt, Homo sapiens
augucccccagaacucggggag

SEQ ID NO: 988 - RNA, 22 nt, Homo sapiens
auguguuggugacuuuuuguuu

SEQ ID NO: 989 - RNA, 22 nt, Homo sapiens
auugcaagagcagcgugacuga

SEQ ID NO: 990 - RNA, 22 nt, Homo sapiens
auuggcaaaaaccgcaauuauu

SEQ ID NO: 991 - RNA, 22 nt, Homo sapiens
auuugucagacuuuuccuuuuu

SEQ ID NO: 992 - RNA, 22 nt, Homo sapiens
cacagcucugcucggcuucuuu

SEQ ID NO: 993 - RNA, 22 nt, Homo sapiens
cagcaaucagacugucgacauu

SEQ ID NO: 994 - RNA, 22 nt, Homo sapiens
caggcugaugagacuaaggcga

SEQ ID NO: 995 - RNA, 22 nt, Homo sapiens
cccagccugcaggugagcucug

SEQ ID NO: 996 - RNA, 22 nt, Homo sapiens
cccugugcagaaacugucauug

SEQ ID NO: 997 - RNA, 22 nt, Homo sapiens
ccugagguaucaggcugaagug

SEQ ID NO: 998 - RNA, 22 nt, Homo sapiens
cgccgccgcggggaaggcgggg

SEQ ID NO: 999 - RNA, 22 nt, Homo sapiens
cggggcccuggacgugggagcu

SEQ ID NO: 1000 - RNA, 22 nt, Homo sapiens
cucaggagucacugggaagaug

SEQ ID NO: 1001 - RNA, 22 nt, Homo sapiens
cucauucccauugaguugugug

SEQ ID NO: 1002 - RNA, 22 nt, Homo sapiens
cucggaggagcaguucugggag

SEQ ID NO: 1003 - RNA, 22 nt, Homo sapiens
cucugaggcccuggcaucuuuu

SEQ ID NO: 1004 - RNA, 22 nt, Homo sapiens
cugaccuugguacccaccgugg

SEQ ID NO: 1005 - RNA, 22 nt, Homo sapiens
cugccugugauaagcaggagga

SEQ ID NO: 1006 - RNA, 22 nt, Homo sapiens
cuggcggagcagcugcggcgcg

SEQ ID NO: 1007 - RNA, 22 nt, Homo sapiens
gaaaggagcccgcaggcggcgg

SEQ ID NO: 1008 - RNA, 22 nt, Homo sapiens
gaacagcgagaggggaggaagu

SEQ ID NO: 1009 - RNA, 22 nt, Homo sapiens
gacuagcagcacauaaugguuu

SEQ ID NO: 1010 - RNA, 22 nt, Homo sapiens
gaggcgccggcgguguuccugg

SEQ ID NO: 1011 - RNA, 22 nt, Homo sapiens
gaugcugcccugcuacgguaua

SEQ ID NO: 1012 - RNA, 22 nt, Homo sapiens
gcacacuggaaugugggucccu

SEQ ID NO: 1013 - RNA, 22 nt, Homo sapiens
gccagacgcgccggagcgggcg

SEQ ID NO: 1014 - RNA, 22 nt, Homo sapiens
gccagcugugccggcguuuguu

SEQ ID NO: 1015 - RNA, 22 nt, Homo sapiens
gccauucgaugaugauuccauu

SEQ ID NO: 1016 - RNA, 22 nt, Homo sapiens
gccugcuuuucugguucucugu

SEQ ID NO: 1017 - RNA, 22 nt, Homo sapiens
gcgagaaagguuuucgccuccu

SEQ ID NO: 1018 - RNA, 22 nt, Homo sapiens
gcucccagugccaucaguguga

SEQ ID NO: 1019 - RNA, 22 nt, Homo sapiens
gcucccugucgcugccggagag

SEQ ID NO: 1020 - RNA, 22 nt, Homo sapiens
ggagcaggaagcuaugcuaauu

SEQ ID NO: 1021 - RNA, 22 nt, Homo sapiens
gggaccugcccuggaggcucuu

SEQ ID NO: 1022 - RNA, 22 nt, Homo sapiens
gggagcauggaggauagauuuu

SEQ ID NO: 1023 - RNA, 22 nt, Homo sapiens
gggcccacccagaugagcucau

SEQ ID NO: 1024 - RNA, 22 nt, Homo sapiens
ggguaucaauggcaucagggaa

SEQ ID NO: 1025 - RNA, 22 nt, Homo sapiens
ggucccugagcaaggagggggu

SEQ ID NO: 1026 - RNA, 22 nt, Homo sapiens
guccucuccucccaagaguugu

SEQ ID NO: 1027 - RNA, 22 nt, Homo sapiens
gugacaggcuggagugcagugg

SEQ ID NO: 1028 - RNA, 22 nt, Homo sapiens
gugacgaggcuaaggccgugga

SEQ ID NO: 1029 - RNA, 22 nt, Homo sapiens
gugaugauucugaccuacaaau

SEQ ID NO: 1030 - RNA, 22 nt, Homo sapiens
gugccuggccugcggccccagg

SEQ ID NO: 1031 - RNA, 22 nt, Homo sapiens
uacagccuccagaacccugagg

SEQ ID NO: 1032 - RNA, 22 nt, Homo sapiens
ucaacccucucaggugaccaaa

SEQ ID NO: 1033 - RNA, 22 nt, Homo sapiens
ucagcguugguucccgucuugg

SEQ ID NO: 1034 - RNA, 22 nt, Homo sapiens
uccccacauucugugagcugug

SEQ ID NO: 1035 - RNA, 22 nt, Homo sapiens
uccggaagccgccgagcccggg

SEQ ID NO: 1036 - RNA, 22 nt, Homo sapiens
uccugaccugcucggaguugaa

SEQ ID NO: 1037 - RNA, 22 nt, Homo sapiens
ucuggaaagcggucugccccug

SEQ ID NO: 1038 - RNA, 22 nt, Homo sapiens
ugaccguggaaaaaguacaggg

SEQ ID NO: 1039 - RNA, 22 nt, Homo sapiens
ugagccucugcucccggccuaa

SEQ ID NO: 1040 - RNA, 22 nt, Homo sapiens
ugaugcuucagucacgacauga

SEQ ID NO: 1041 - RNA, 22 nt, Homo sapiens
ugcccagcaagcugcgcucccu

SEQ ID NO: 1042 - RNA, 22 nt, Homo sapiens
ugccccugagagggagcggcgg

SEQ ID NO: 1043 - RNA, 22 nt, Homo sapiens
ugcccguugucuaggagacaga

SEQ ID NO: 1044 - RNA, 22 nt, Homo sapiens
ugcuguccaugggcuucucuga

SEQ ID NO: 1045 - RNA, 22 nt, Homo sapiens
uggaaagucacccguaaggaug

SEQ ID NO: 1046 - RNA, 22 nt, Homo sapiens
uggaacgccccggcuggguggu

SEQ ID NO: 1047 - RNA, 22 nt, Homo sapiens
ugggcugcggugggcucggcug

SEQ ID NO: 1048 - RNA, 22 nt, Homo sapiens
ugggucuggcugcugccgcccg

SEQ ID NO: 1049 - RNA, 22 nt, Homo sapiens
ugucauuuccaaaauacugguu

SEQ ID NO: 1050 - RNA, 22 nt, Homo sapiens
uguucuccacgccgcacgggcu

SEQ ID NO: 1051 - RNA, 22 nt, Homo sapiens
uuccggauggugagcggcgaag

SEQ ID NO: 1052 - RNA, 22 nt, Homo sapiens
uugaccucaccaagagggcggg

SEQ ID NO: 1053 - RNA, 22 nt, Homo sapiens
uugcuuuccauagacauagauu

SEQ ID NO: 1054 - RNA, 22 nt, Homo sapiens
uuggccaggaagggcaggagag

SEQ ID NO: 1055 - RNA, 22 nt, Homo sapiens
uugugaauuuggcuccgcgaag

SEQ ID NO: 1056 - RNA, 22 nt, Homo sapiens
uugugcuccuuucauuccugaa

SEQ ID NO: 1057 - RNA, 22 nt, Homo sapiens
uuugcagccugcaggggccugg

SEQ ID NO: 1058 - RNA, 22 nt, Homo sapiens
uuugcagcuuugaagcugcugg

SEQ ID NO: 1059 - RNA, 22 nt, Homo sapiens
uuuguggaaaguugugaagaua

SEQ ID NO: 1060 - RNA, 21 nt, Homo sapiens
aaaacuucacauaguuugauu

SEQ ID NO: 1061 - RNA, 21 nt, Homo sapiens
aaacggcaaugacuuuuguac

SEQ ID NO: 1062 - RNA, 21 nt, Homo sapiens
aaagacugcgugucaagauuc

SEQ ID NO: 1063 - RNA, 21 nt, Homo sapiens
aacgagcgccugcacagggcc

SEQ ID NO: 1064 - RNA, 21 nt, Homo sapiens
aaggccaagaaggaggcgccg

SEQ ID NO: 1065 - RNA, 21 nt, Homo sapiens
aagucauuggaggguuugagc

SEQ ID NO: 1066 - RNA, 21 nt, Homo sapiens
aagucgcuugggcuucgcccg

SEQ ID NO: 1067 - RNA, 21 nt, Homo sapiens
acaccacuacuggacacgguc

SEQ ID NO: 1068 - RNA, 21 nt, Homo sapiens
accacuaagcgguucccuuca

SEQ ID NO: 1069 - RNA, 21 nt, Homo sapiens
acggugcuggauguggccuuu

SEQ ID NO: 1070 - RNA, 21 nt, Homo sapiens
acucguccgcuccgcucugga

SEQ ID NO: 1071 - RNA, 21 nt, Homo sapiens
acuucgaccugagcugggagg

SEQ ID NO: 1072 - RNA, 21 nt, Homo sapiens
agaauuuuguuugaaauccuu

SEQ ID NO: 1073 - RNA, 21 nt, Homo sapiens
agaggagcgagcuggacgcca

SEQ ID NO: 1074 - RNA, 21 nt, Homo sapiens
agaugcggcguucccugccuc

SEQ ID NO: 1075 - RNA, 21 nt, Homo sapiens
agcccagacuggacuagcaag

SEQ ID NO: 1076 - RNA, 21 nt, Homo sapiens
agcgcagggaagccugggggc

SEQ ID NO: 1077 - RNA, 21 nt, Homo sapiens
agcggaugcgggaagccggac

SEQ ID NO: 1078 - RNA, 21 nt, Homo sapiens
aggaagccgcgucguccgggg

SEQ ID NO: 1079 - RNA, 21 nt, Homo sapiens
aggacacucauaaguacgagu

SEQ ID NO: 1080 - RNA, 21 nt, Homo sapiens
aggaggcuccugcccucccgu

SEQ ID NO: 1081 - RNA, 21 nt, Homo sapiens
aggcagggguagcccuggggu

SEQ ID NO: 1082 - RNA, 21 nt, Homo sapiens
aggccccugcaguaugugggc

SEQ ID NO: 1083 - RNA, 21 nt, Homo sapiens
aggcgaagcuggccgagcagg

SEQ ID NO: 1084 - RNA, 21 nt, Homo sapiens
aggcggggcgaaggcggagcc

SEQ ID NO: 1085 - RNA, 21 nt, Homo sapiens
aggugcuuuggucauuccuuu

SEQ ID NO: 1086 - RNA, 21 nt, Homo sapiens
augcccuccaggcccuggggc

SEQ ID NO: 1087 - RNA, 21 nt, Homo sapiens
augcugagccugcaauuugcu

SEQ ID NO: 1088 - RNA, 21 nt, Homo sapiens
auugggcuggcagcaggacga

SEQ ID NO: 1089 - RNA, 21 nt, Homo sapiens
auuuucuggccugagagaaag

SEQ ID NO: 1090 - RNA, 21 nt, Homo sapiens
cacuauguccaaacuucugac

SEQ ID NO: 1091 - RNA, 21 nt, Homo sapiens
cagccucggcuacagcuucgg

SEQ ID NO: 1092 - RNA, 21 nt, Homo sapiens
caggcacagagcugagcaagg

SEQ ID NO: 1093 - RNA, 21 nt, Homo sapiens
caggucuucagacuguggggc

SEQ ID NO: 1094 - RNA, 21 nt, Homo sapiens
cagguuggccuggcaugccca

SEQ ID NO: 1095 - RNA, 21 nt, Homo sapiens
cgccaagcucgccugcacccc

SEQ ID NO: 1096 - RNA, 21 nt, Homo sapiens
cggcccagaccauccuggaga

SEQ ID NO: 1097 - RNA, 21 nt, Homo sapiens
cgggacccuguugggaacugu

SEQ ID NO: 1098 - RNA, 21 nt, Homo sapiens
cguggacgccgccgaagaagc

SEQ ID NO: 1099 - RNA, 21 nt, Homo sapiens
cucggacuccugccucacuca

SEQ ID NO: 1100 - RNA, 21 nt, Homo sapiens
cuggccaggcaugguggcucu

SEQ ID NO: 1101 - RNA, 21 nt, Homo sapiens
cugugagaauuuugggagugu

SEQ ID NO: 1102 - RNA, 21 nt, Homo sapiens
gaaacugggcaaaggagcagg

SEQ ID NO: 1103 - RNA, 21 nt, Homo sapiens
gaaugcucguuagccaugugc

SEQ ID NO: 1104 - RNA, 21 nt, Homo sapiens
gagcaggcuccgggggacagg

SEQ ID NO: 1105 - RNA, 21 nt, Homo sapiens
gagcgaagagggaauagccca

SEQ ID NO: 1106 - RNA, 21 nt, Homo sapiens
gcucgggacacggggccacca

SEQ ID NO: 1107 - RNA, 21 nt, Homo sapiens
ggcuccgcagcccgccgggag

SEQ ID NO: 1108 - RNA, 21 nt, Homo sapiens
ggcucugcaagagcucccugg

SEQ ID NO: 1109 - RNA, 21 nt, Homo sapiens
gggcagggaccucggggggcu

SEQ ID NO: 1110 - RNA, 21 nt, Homo sapiens
ggggggaggagagagaagaga

SEQ ID NO: 1111 - RNA, 21 nt, Homo sapiens
gucuuggacaccgguaucuga

SEQ ID NO: 1112 - RNA, 21 nt, Homo sapiens
uccuggggcuggcacucguug

SEQ ID NO: 1113 - RNA, 21 nt, Homo sapiens
ucugcagcgcaacgccugagg

SEQ ID NO: 1114 - RNA, 21 nt, Homo sapiens
ugcggagcugcuucgccgcug

SEQ ID NO: 1115 - RNA, 21 nt, Homo sapiens
uggacaggccaaaacacacac

SEQ ID NO: 1116 - RNA, 21 nt, Homo sapiens
ugggagggguauggagaaguc

SEQ ID NO: 1117 - RNA, 21 nt, Homo sapiens
ugggcgagcagcggcgggggc

SEQ ID NO: 1118 - RNA, 21 nt, Homo sapiens
ugguagcauguuggaaaaagu

SEQ ID NO: 1119 - RNA, 21 nt, Homo sapiens
ugugacugcauuaugaaaauu

SEQ ID NO: 1120 - RNA, 21 nt, Homo sapiens
uucuccuggcaaccucccugc

SEQ ID NO: 1121 - RNA, 21 nt, Homo sapiens
uugcccuccaaagcucuaggc

SEQ ID NO: 1122 - RNA, 21 nt, Homo sapiens
uuugacuccgggucucacauc

SEQ ID NO: 1123 - RNA, 20 nt, Homo sapiens
aaacggcugcacacuucagg

SEQ ID NO: 1124 - RNA, 20 nt, Homo sapiens
aacggauaaccagaggccaa

SEQ ID NO: 1125 - RNA, 20 nt, Homo sapiens
aagcaucauuggugauaauc

SEQ ID NO: 1126 - RNA, 20 nt, Homo sapiens
aaggacuuggacuacuacgg

SEQ ID NO: 1127 - RNA, 20 nt, Homo sapiens
acaauguucauugaaauugg

SEQ ID NO: 1128 - RNA, 20 nt, Homo sapiens
acaggagucaacaagauaau

SEQ ID NO: 1129 - RNA, 20 nt, Homo sapiens
accaguaugucuggacgugg

SEQ ID NO: 1130 - RNA, 20 nt, Homo sapiens
acugcggcaaggccuucagc

SEQ ID NO: 1131 - RNA, 20 nt, Homo sapiens
agaaggcuggauugaggcuc

SEQ ID NO: 1132 - RNA, 20 nt, Homo sapiens
agaccgccuuucaggacacu

SEQ ID NO: 1133 - RNA, 20 nt, Homo sapiens
agagcgugaaggcgaaugcc

SEQ ID NO: 1134 - RNA, 20 nt, Homo sapiens
agcacugcccgcccaggcaa

SEQ ID NO: 1135 - RNA, 20 nt, Homo sapiens
agcagucugaggaggaccug

SEQ ID NO: 1136 - RNA, 20 nt, Homo sapiens
agcggccucaggccuguguc

SEQ ID NO: 1137 - RNA, 20 nt, Homo sapiens
auccucuuguuuaaauugua

SEQ ID NO: 1138 - RNA, 20 nt, Homo sapiens
augggaacgcagccuccagu

SEQ ID NO: 1139 - RNA, 20 nt, Homo sapiens
auguccuggguagauggcuu

SEQ ID NO: 1140 - RNA, 20 nt, Homo sapiens
auuccaccccagaagugacu

SEQ ID NO: 1141 - RNA, 20 nt, Homo sapiens
auugcacuguguguuaaaga

SEQ ID NO: 1142 - RNA, 20 nt, Homo sapiens
cacaucgugcccugcugggc

SEQ ID NO: 1143 - RNA, 20 nt, Homo sapiens
cagaugugugucaguugaaa

SEQ ID NO: 1144 - RNA, 20 nt, Homo sapiens
ccuggugcugcuccagguca

SEQ ID NO: 1145 - RNA, 20 nt, Homo sapiens
cgccacaugcucugugauuc

SEQ ID NO: 1146 - RNA, 20 nt, Homo sapiens
cucuucuggcuggcaccguc

SEQ ID NO: 1147 - RNA, 20 nt, Homo sapiens
cuucgaagacaccgccgcuu

SEQ ID NO: 1148 - RNA, 20 nt, Homo sapiens
cuugaggcagggguuagagg

SEQ ID NO: 1149 - RNA, 20 nt, Homo sapiens
gagacggagucuugcucaag

SEQ ID NO: 1150 - RNA, 20 nt, Homo sapiens
gaggcagcgcagcccgugaa

SEQ ID NO: 1151 - RNA, 20 nt, Homo sapiens
gauuuccuguugacaugcca

SEQ ID NO: 1152 - RNA, 20 nt, Homo sapiens
gcacagccuccgggagcuac

SEQ ID NO: 1153 - RNA, 20 nt, Homo sapiens
gcggggcuagggcuaacagc

SEQ ID NO: 1154 - RNA, 20 nt, Homo sapiens
gcuaaguagggagccacaga

SEQ ID NO: 1155 - RNA, 20 nt, Homo sapiens
gcuucgagaggcuucugcug

SEQ ID NO: 1156 - RNA, 20 nt, Homo sapiens
gggucggcuguuuacucagc

SEQ ID NO: 1157 - RNA, 20 nt, Homo sapiens
guguaaccuugggcaauuug

SEQ ID NO: 1158 - RNA, 20 nt, Homo sapiens
uacaggcuaacacagggaaa

SEQ ID NO: 1159 - RNA, 20 nt, Homo sapiens
ucugaggaaggaccaggaag

SEQ ID NO: 1160 - RNA, 20 nt, Homo sapiens
ucuggagucugaaguagcua

SEQ ID NO: 1161 - RNA, 20 nt, Homo sapiens
uggacccgccacgggagcuu

SEQ ID NO: 1162 - RNA, 20 nt, Homo sapiens
uuggccgaugggaauggucu

SEQ ID NO: 1163 - RNA, 20 nt, Homo sapiens
uugucaacagguacuauuug

SEQ ID NO: 1164 - RNA, 20 nt, Homo sapiens
uuuggcucucugaccagcac

SEQ ID NO: 1165 - RNA, 19 nt, Homo sapiens
aaacgcuuucugauguacu

SEQ ID NO: 1166 - RNA, 19 nt, Homo sapiens
aaacucagauguccaaacu

SEQ ID NO: 1167 - RNA, 19 nt, Homo sapiens
aaaggaugugugguuugcu

SEQ ID NO: 1168 - RNA, 19 nt, Homo sapiens
aaaggauuuaccugaggcc

SEQ ID NO: 1169 - RNA, 19 nt, Homo sapiens
acaagcaucucaaugacau

SEQ ID NO: 1170 - RNA, 19 nt, Homo sapiens
acaggucaauggguuuuga

SEQ ID NO: 1171 - RNA, 19 nt, Homo sapiens
acuaccacagaggcuauga

SEQ ID NO: 1172 - RNA, 19 nt, Homo sapiens
acucugcuuaucaaguuuc

SEQ ID NO: 1173 - RNA, 19 nt, Homo sapiens
aggaggaagcuccuggcca

SEQ ID NO: 1174 - RNA, 19 nt, Homo sapiens
agguucucccuugcaugca

SEQ ID NO: 1175 - RNA, 19 nt, Homo sapiens
augagcugggacuggcagg

SEQ ID NO: 1176 - RNA, 19 nt, Homo sapiens
auugaaggacuggaguuca

SEQ ID NO: 1177 - RNA, 19 nt, Homo sapiens
auugggaagcugggggaag

SEQ ID NO: 1178 - RNA, 19 nt, Homo sapiens
cacagagcacauguauuag

SEQ ID NO: 1179 - RNA, 19 nt, Homo sapiens
cggacccagacugguagug

SEQ ID NO: 1180 - RNA, 19 nt, Homo sapiens
cggcgccucggagggcucg

SEQ ID NO: 1181 - RNA, 19 nt, Homo sapiens
cugcgucuuugugcuuuca

SEQ ID NO: 1182 - RNA, 19 nt, Homo sapiens
gaaaaaggacaggaaaugu

SEQ ID NO: 1183 - RNA, 19 nt, Homo sapiens
gaacuggugcccaccgagg

SEQ ID NO: 1184 - RNA, 19 nt, Homo sapiens
gagagcgagugagcugggg

SEQ ID NO: 1185 - RNA, 19 nt, Homo sapiens
gagcugaaucuuuguggag

SEQ ID NO: 1186 - RNA, 19 nt, Homo sapiens
gccgcgcuggcauuuucuc

SEQ ID NO: 1187 - RNA, 19 nt, Homo sapiens
gcucaggcgagggagauga

SEQ ID NO: 1188 - RNA, 19 nt, Homo sapiens
gcuugauaaccccugcgcc

SEQ ID NO: 1189 - RNA, 19 nt, Homo sapiens
ggacucaggaaggcuucug

SEQ ID NO: 1190 - RNA, 19 nt, Homo sapiens
gggcgaagcgcacgucgag

SEQ ID NO: 1191 - RNA, 19 nt, Homo sapiens
gggcuaugacaugcuagag

SEQ ID NO: 1192 - RNA, 19 nt, Homo sapiens
gguuuuguaaucuagcuuc

SEQ ID NO: 1193 - RNA, 19 nt, Homo sapiens
gucccggaagccccugugg

SEQ ID NO: 1194 - RNA, 19 nt, Homo sapiens
ucugcuggggcaaaggagc

SEQ ID NO: 1195 - RNA, 19 nt, Homo sapiens
ucuggcaggucugcucacc

SEQ ID NO: 1196 - RNA, 19 nt, Homo sapiens
ugagcgacagggcaaggcc

SEQ ID NO: 1197 - RNA, 19 nt, Homo sapiens
ugaggagcugccucgcgca

SEQ ID NO: 1198 - RNA, 19 nt, Homo sapiens
ugucgcggcugcugagcgc

SEQ ID NO: 1199 - RNA, 19 nt, Homo sapiens
uuguccacagcagaugagg

SEQ ID NO: 1200 - RNA, 18 nt, Homo sapiens
aacuccgacacuuguggg

SEQ ID NO: 1201 - RNA, 18 nt, Homo sapiens
acagcuuuggaugugagg

SEQ ID NO: 1202 - RNA, 18 nt, Homo sapiens
agagagcaagcaggaagc

SEQ ID NO: 1203 - RNA, 18 nt, Homo sapiens
agaggaagaugaugauga

SEQ ID NO: 1204 - RNA, 18 nt, Homo sapiens
agaugagaugccgcugca

SEQ ID NO: 1205 - RNA, 18 nt, Homo sapiens
aggacuuggacagagggc

SEQ ID NO: 1206 - RNA, 18 nt, Homo sapiens
aggauguggggaugcugc

SEQ ID NO: 1207 - RNA, 18 nt, Homo sapiens
aggggugaaggugggggc

SEQ ID NO: 1208 - RNA, 18 nt, Homo sapiens
aucagcaugguugucacg

SEQ ID NO: 1209 - RNA, 18 nt, Homo sapiens
aucccuguacgcugcuuc

SEQ ID NO: 1210 - RNA, 18 nt, Homo sapiens
auguagagcacauguuau

SEQ ID NO: 1211 - RNA, 18 nt, Homo sapiens
auucugaaaaguucguga

SEQ ID NO: 1212 - RNA, 18 nt, Homo sapiens
ccgccccccggccccagc

SEQ ID NO: 1213 - RNA, 18 nt, Homo sapiens
cgaagagcugcggcacca

SEQ ID NO: 1214 - RNA, 18 nt, Homo sapiens
cggcagccgggacgcaga

SEQ ID NO: 1215 - RNA, 18 nt, Homo sapiens
cggcgggugcggggguaa

SEQ ID NO: 1216 - RNA, 18 nt, Homo sapiens
cuucccuuccugaagggc

SEQ ID NO: 1217 - RNA, 18 nt, Homo sapiens
cuuugcagcggcggcagc

SEQ ID NO: 1218 - RNA, 18 nt, Homo sapiens
gaaaugccuguucuucag

SEQ ID NO: 1219 - RNA, 18 nt, Homo sapiens
gaacccugaggaacagac

SEQ ID NO: 1220 - RNA, 18 nt, Homo sapiens
gaacuguucugcugcugg

SEQ ID NO: 1221 - RNA, 18 nt, Homo sapiens
gcccagguagaggggucc

SEQ ID NO: 1222 - RNA, 18 nt, Homo sapiens
gcccggugcccgaggagg

SEQ ID NO: 1223 - RNA, 18 nt, Homo sapiens
gcuccaccacagccaggc

SEQ ID NO: 1224 - RNA, 18 nt, Homo sapiens
ggcggagccgcucugccu

SEQ ID NO: 1225 - RNA, 18 nt, Homo sapiens
ggguuaggguugcacacg

SEQ ID NO: 1226 - RNA, 18 nt, Homo sapiens
ucaccccuguaauuucaa

SEQ ID NO: 1227 - RNA, 18 nt, Homo sapiens
ucucaucccugucggccg

SEQ ID NO: 1228 - RNA, 18 nt, Homo sapiens
ugucaguuugucaacagc

SEQ ID NO: 1229 - RNA, 18 nt, Homo sapiens
uucuuucugccucugaag

SEQ ID NO: 1230 - RNA, 17 nt, Homo sapiens
aaauaguacugugauac

SEQ ID NO: 1231 - RNA, 17 nt, Homo sapiens
aaauuuuccagauacgg

SEQ ID NO: 1232 - RNA, 17 nt, Homo sapiens
aagccccacacuguccc

SEQ ID NO: 1233 - RNA, 17 nt, Homo sapiens
acuggugggagaggcaa

SEQ ID NO: 1234 - RNA, 17 nt, Homo sapiens
aggagucaggagcuggg

SEQ ID NO: 1235 - RNA, 17 nt, Homo sapiens
aggcacccugaggcaug

SEQ ID NO: 1236 - RNA, 17 nt, Homo sapiens
aggugaaugagugaaag

SEQ ID NO: 1237 - RNA, 17 nt, Homo sapiens
aucugccagggauuucc

SEQ ID NO: 1238 - RNA, 17 nt, Homo sapiens
augcucugaguuaaaau

SEQ ID NO: 1239 - RNA, 17 nt, Homo sapiens
augugcggaagggaaac

SEQ ID NO: 1240 - RNA, 17 nt, Homo sapiens
caguucagccaagcaac

SEQ ID NO: 1241 - RNA, 17 nt, Homo sapiens
ccacgcggcggggggag

SEQ ID NO: 1242 - RNA, 17 nt, Homo sapiens
cgccgcggcccgggagc

SEQ ID NO: 1243 - RNA, 17 nt, Homo sapiens
cggcauccggguuccuu

SEQ ID NO: 1244 - RNA, 17 nt, Homo sapiens
cuggcucagauugaaca

SEQ ID NO: 1245 - RNA, 17 nt, Homo sapiens
gcccgccgcggggcccc

SEQ ID NO: 1246 - RNA, 17 nt, Homo sapiens
uaccaaagcagucccac

SEQ ID NO: 1247 - RNA, 17 nt, Homo sapiens
ucagugcuuccaaccug

SEQ ID NO: 1248 - RNA, 17 nt, Homo sapiens
ucugagcacagcgccuu

SEQ ID NO: 1249 - RNA, 16 nt, Homo sapiens
aaaaacaagguacuuu

SEQ ID NO: 1250 - RNA, 16 nt, Homo sapiens
aaggaacuuagggaaa

SEQ ID NO: 1251 - RNA, 16 nt, Homo sapiens
aaggguuuccuggcaa

SEQ ID NO: 1252 - RNA, 16 nt, Homo sapiens
agggcucagagcacug

SEQ ID NO: 1253 - RNA, 16 nt, Homo sapiens
aucggcacugagacac

SEQ ID NO: 1254 - RNA, 16 nt, Homo sapiens
auuggcccugcucagg

SEQ ID NO: 1255 - RNA, 16 nt, Homo sapiens
caagcacuacuagauu

SEQ ID NO: 1256 - RNA, 16 nt, Homo sapiens
ccucacgagugucaca

SEQ ID NO: 1257 - RNA, 16 nt, Homo sapiens
cggaagggucugcauc

SEQ ID NO: 1258 - RNA, 16 nt, Homo sapiens
cuggacaaggcggcug

SEQ ID NO: 1259 - RNA, 16 nt, Homo sapiens
cugugggagccagguu

SEQ ID NO: 1260 - RNA, 16 nt, Homo sapiens
gccgguccccaaggcu

SEQ ID NO: 1261 - RNA, 15 nt, Homo sapiens
agaggauugaguacc

SEQ ID NO: 1262 - RNA, 15 nt, Homo sapiens
auugacugauguuga

SEQ ID NO: 1263 - RNA, 15 nt, Homo sapiens
ccuacagggcuauga

SEQ ID NO: 1264 - RNA, 15 nt, Homo sapiens
gcggucuccugucca

SEQ ID NO: 1265 - RNA, 15 nt, Homo sapiens
ugccggggccuugag

SEQ ID NO: 1266 - RNA, 15 nt, Homo sapiens
gcggcggcggcggag

SEQ ID NO: 1267 - RNA, 22 nt, Homo sapiens
aacaucacagcaagucugugcu

SEQ ID NO: 1268 - RNA, 22 nt, Homo sapiens
gcccuguggacucaguucuggu

SEQ ID NO: 1269 - RNA, 21 nt, Homo sapiens
aacacaccuauucaaggauuc

SEQ ID NO: 1270 - RNA, 21 nt, Homo sapiens
gcaguccaugggcauauacac

SEQ ID NO: 1271 - RNA, 22 nt, Homo sapiens
cuuagcagguuguauuaucauu

SEQ ID NO: 1272 - RNA, 22 nt, Homo sapiens
caacccuaggagagggugccau

SEQ ID NO: 1273 - RNA, 22 nt, Homo sapiens
cugcccuggcccgagggaccga

SEQ ID NO: 1274 - RNA, 20 nt, Homo sapiens
cgggcggcggcggcggcaga

SEQ ID NO: 1275 - RNA, 22 nt, Homo sapiens
aauggaccuccuuggagaccga

SEQ ID NO: 1276 - RNA, 22 nt, Homo sapiens
aguggcggcugcagaaagcgug

SEQ ID NO: 1277 - RNA, 22 nt, Homo sapiens
aguucuugcggcugugugaacu

SEQ ID NO: 1278 - RNA, 22 nt, Homo sapiens
ucuuguccuggugugcuagagu

SEQ ID NO: 1279 - RNA, 17 nt, Homo sapiens
uaugggcccggagcgaa

SEQ ID NO: 1280 - RNA, 22 nt, Homo sapiens
auaacauuguaaagcgcuucuu

SEQ ID NO: 1281 - RNA, 18 nt, Homo sapiens
cucagucugcagcagcuc

SEQ ID NO: 1282 - RNA, 21 nt, Homo sapiens
acgaagcacuuccccgaguuc

SEQ ID NO: 1283 - RNA, 21 nt, Homo sapiens
aucuuggaaggcucugaaccu

SEQ ID NO: 1284 - RNA, 21 nt, Homo sapiens
caaggaaggcuuccggaugcu

SEQ ID NO: 1285 - RNA, 20 nt, Homo sapiens
acaaucaguauucaccucca

SEQ ID NO: 1286 - RNA, 19 nt, Homo sapiens
agaaugaugucguccgaau

SEQ ID NO: 1287 - RNA, 19 nt, Homo sapiens
aucgcucggguacgcucca

SEQ ID NO: 1288 - RNA, 18 nt, Homo sapiens
cagggagacaaaauggag

SEQ ID NO: 1289 - RNA, 17 nt, Homo sapiens
uccggugucucugcaau

SEQ ID NO: 1290 - RNA, 22 nt, Homo sapiens
uacgaaggccuggucgcuuuga

SEQ ID NO: 1291 - RNA, 21 nt, Homo sapiens
aguccuccgggugagccgccc

SEQ ID NO: 1292 - RNA, 21 nt, Homo sapiens
ucacccuaacaagccgcaacg

SEQ ID NO: 1293 - RNA, 18 nt, Homo sapiens
aaaaaugugauguggacc

SEQ ID NO: 1294 - RNA, 21 nt, Homo sapiens
auacaaucuacugucuuuccu

SEQ ID NO: 1295 - RNA, 20 nt, Homo sapiens
cuauacgaccugcugccuuu

SEQ ID NO: 1296 - RNA, 20 nt, Homo sapiens
cuauacagucuacugucuuu

SEQ ID NO: 1297 - RNA, 19 nt, Homo sapiens
ucaguuaucacagugcuga

SEQ ID NO: 1298 - RNA, 21 nt, Homo sapiens
uaccgcacuguggguacuugc

SEQ ID NO: 1299 - RNA, 19 nt, Homo sapiens
aggugagguucuugggagc

SEQ ID NO: 1300 - RNA, 21 nt, Homo sapiens
cggggccguagcacugucuga

SEQ ID NO: 1301 - RNA, 19 nt, Homo sapiens
cuuucccuguugcacuacu

SEQ ID NO: 1302 - RNA, 20 nt, Homo sapiens
aaccguggcuuucgauuguu

SEQ ID NO: 1303 - RNA, 19 nt, Homo sapiens
cuuccaguacaguguugga

SEQ ID NO: 1304 - RNA, 20 nt, Homo sapiens
aaaguucugagacacuccga

SEQ ID NO: 1305 - RNA, 21 nt, Homo sapiens
gcaggccauauugugcugccu

SEQ ID NO: 1306 - RNA, 21 nt, Homo sapiens
ccaguauuaacugugcugcug

SEQ ID NO: 1307 - RNA, 18 nt, Homo sapiens
aauauuacugugcugcuu

SEQ ID NO: 1308 - RNA, 21 nt, Homo sapiens
ucgacagcacgacacugccuu

SEQ ID NO: 1309 - RNA, 19 nt, Homo sapiens
uugcagguuugcauccagc

SEQ ID NO: 1310 - RNA, 22 nt, Homo sapiens
agccccugcccaccgcacacug

SEQ ID NO: 1311 - RNA, 19 nt, Homo sapiens
aguucuucaguggcaagcu

SEQ ID NO: 1312 - RNA, 22 nt, Homo sapiens
accuggcauacaauguagauuu

SEQ ID NO: 1313 - RNA, 21 nt, Homo sapiens
cguguauuugacaagcugagu

SEQ ID NO: 1314 - RNA, 21 nt, Homo sapiens
gugccuacugagcugaaacac

SEQ ID NO: 1315 - RNA, 19 nt, Homo sapiens
aggcggagacuugggcaau

SEQ ID NO: 1316 - RNA, 21 nt, Homo sapiens
ccuauucuugauuacuuguuu

SEQ ID NO: 1317 - RNA, 21 nt, Homo sapiens
ccuguucuccauuacuuggcu

SEQ ID NO: 1318 - RNA, 20 nt, Homo sapiens
acugauuucuuuugguguuc

SEQ ID NO: 1319 - RNA, 22 nt, Homo sapiens
gcugguuucauauggugguuua

SEQ ID NO: 1320 - RNA, 21 nt, Homo sapiens
cugggagaggguuguuuacuc

SEQ ID NO: 1321 - RNA, 18 nt, Homo sapiens
cagucagauguuugcugc

SEQ ID NO: 1322 - RNA, 21 nt, Homo sapiens
caauguuuccacagugcauca

SEQ ID NO: 1323 - RNA, 16 nt, Homo sapiens
cucgacgacagagccg

SEQ ID NO: 1324 - RNA, 18 nt, Homo sapiens
aaagcaaugagacugauu

SEQ ID NO: 1325 - RNA, 22 nt, Homo sapiens
aggggugcuaucugugauugag

SEQ ID NO: 1326 - RNA, 19 nt, Homo sapiens
caaucagcaaguauacugc

SEQ ID NO: 1327 - RNA, 22 nt, Homo sapiens
ucccccaggugugauucugauu

SEQ ID NO: 1328 - RNA, 22 nt, Homo sapiens
uaauccuugcuaccugggugag

SEQ ID NO: 1329 - RNA, 21 nt, Homo sapiens
acugcugagcuagcacuuccc

SEQ ID NO: 1330 - RNA, 20 nt, Homo sapiens
uaccacaggguagaaccacg

SEQ ID NO: 1331 - RNA, 22 nt, Homo sapiens
ucgaggagcucacagucuagua

SEQ ID NO: 1332 - RNA, 20 nt, Homo sapiens
cucacugaacaaugaaugca

SEQ ID NO: 1333 - RNA, 24 nt, Homo sapiens
gcugguuucacaugguggcuuaga

SEQ ID NO: 1334 - RNA, 23 nt, Homo sapiens
accgauuucuccugguguucaga

SEQ ID NO: 1335 - RNA, 16 nt, Homo sapiens
ugaggggcagagagcg

SEQ ID NO: 1336 - RNA, 20 nt, Homo sapiens
aacaaaucacagucugccau

SEQ ID NO: 1337 - RNA, 78 nt, Homo sapiens
caguugguccgaguguuguggguuauuguuaaguugauuuaacauugucuccccccacaaccgcgcuugacuagcuug

SEQ ID NO: 1338 - RNA, 88 nt, Homo sapiens
gggagagccagcagcacauccgugaggggccagauggcaaggucaagauccauccauccccugcccccucgggucacgugcuggcccc

SEQ ID NO: 1339 - RNA, 84 nt, Homo sapiens
ggcuguacuguguuccccccaaaauucauaauguugaaguccucaccuuuagcauaugaauuuuuggggggauacagugcagcc

SEQ ID NO: 1340 - RNA, 102 nt, Homo sapiens
gcgcggagaccgaaggcuggcggcuggucgcguugcaggugagguugugacgcgcgguguggagccgcggcccgggugcgucccugucugguuccugggcgg

SEQ ID NO: 1341 - RNA, 65 nt, Homo sapiens
agauagcagcugagccaagaaggcaaaguaagcccaguaucucuuccuuaugcucuacugcuucu

SEQ ID NO: 1342 - RNA, 74 nt, Homo sapiens
uucuaaguuuaggacaugaauauuauuuuuuucuggaaaagaagaugaguauauguguaauaagacaaguagaa

SEQ ID NO: 1343 - RNA, 88 nt, Homo sapiens
guugcccaggcaauggcacgaucucagcucacugcaaccucugccuccugggcugaagugauucuccugccucagccuccugagcagc

SEQ ID NO: 1344 - RNA, 61 nt, Homo sapiens
ugggcugaagugauucuccugccucggccucccaaaggcaugagccacuguccccagccca

SEQ ID NO: 1345 - RNA, 83 nt, Homo sapiens
gagagaugagacagggucucgcuauauugcccaggcuggucuccaacuccugggcugaagugauucuccugccuuggccucuc

SEQ ID NO: 1346 - RNA, 72 nt, Homo sapiens
cugggcugaagugauucuccugccucagccucccuaguagcugggacuacaggcacacaccaccaugcccag

SEQ ID NO: 1347 - RNA, 79 nt, Homo sapiens
aggcuggagugcaaugacacaaucucagcucacugcaaccuccaccucuugggcugaagugauucuccugccucagccu

SEQ ID NO: 1348 - RNA, 79 nt, Homo sapiens
aggcuggagugcaguggugugaucucagcuuacuuuauccuccaccuucugggcugaagugauucuccugccucggccu

SEQ ID NO: 1349 - RNA, 73 nt, Homo sapiens
aggcuggagaauagcggugcaaucauagcucacugcaguuuugaacuccugggcugaagugauucuccugccu

SEQ ID NO: 1350 - RNA, 71 nt, Homo sapiens
cugggcugaagugauucuccugccuuagccuuuugaggagccagggcuucaggaaugcacuaucacaccug

SEQ ID NO: 1351 - RNA, 79 nt, Homo sapiens
aggcuggaguacagugguacaaucucggcucacugcaaccucugccuccugggcugaagugauucuccugccucagccu

SEQ ID NO: 1352 - RNA, 81 nt, Homo sapiens
cccagaagauccugccugugcucugcggucucacuguagauccugagaaauccgugcgagaccaggugaggcacagcuggg

SEQ ID NO: 1353 - RNA, 64 nt, Homo sapiens
gcucggugcucuucuggugcuguccccucaggugcugcugaggaagcggagccggagcccgagc

SEQ ID NO: 1354 - RNA, 79 nt, Homo sapiens
gccugccgcgugcggagccggagcccgagccugaguggcgccgggcccgacguggggcuccugggccgcggcggcgggc

SEQ ID NO: 1355 - RNA, 67 nt, Homo sapiens
gccccgacggggagccaagaagcggguucucaccagcaaccgcaucugcuggccccuugaucugggc

SEQ ID NO: 1356 - RNA, 76 nt, Homo sapiens
aggcuggugcaaaaguaauggcgguuuuugccguuaaagguaauugcaaaaaccgccauuacuuuugcaccaaccu

SEQ ID NO: 1357 - RNA, 76 nt, Homo sapiens
agguuggugcaaaaguaauggcgguuuuugcaauuaccuuuaacggcaaaaaccgccauuacuuuugcaccagccu

SEQ ID NO: 1358 - RNA, 80 nt, Homo sapiens
uuaguuugguacaaaaguaauggcguuuuuugccauuacuuugaaugguaaaaaccgccauuacuuuugcaccaaccuaa

SEQ ID NO: 1359 - RNA, 72 nt, Homo sapiens
guuggugcaaaaguaauggucaucuuugccauugaaagaaauggcaaaaaccgccauuacuuuugcaccaac

SEQ ID NO: 1360 - RNA, 79 nt, Homo sapiens
aggacggugcaaaaguaauggcgguuuuagccauuuuaaaaaguaauggcaaaaaccgccauuacuuuugcaccaaccu

SEQ ID NO: 1361 - RNA, 76 nt, Homo sapiens
gcagugcuaaugcccuggauccaugaauugccggcggggugcacccagggcucagagagaaggguuuugagacagc

SEQ ID NO: 1362 - RNA, 65 nt, Homo sapiens
ccuucucucugcauugucuugccucugcuucucucugcagcucaggcaggccaucuucagcaagg

SEQ ID NO: 1363 - RNA, 89 nt, Homo sapiens
gaaauccuacucggauggauauaauacaaccugcuaaguguccuagcacuuagcagguuguauuaucauuguccgugucuauggcucuc

SEQ ID NO: 1364 - RNA, 51 nt, Homo sapiens
uuccccugccccugagauucugauucauaaguccggagagggagccuggaa

SEQ ID NO: 1365 - RNA, 104 nt, Homo sapiens
gggcggggugggccuggugggcgggcggggcucggggcgggggcggagagggagccuggugggcgggcggggcgcgucuugcgggcucccucggguaccggcgc

SEQ ID NO: 1366 - RNA, 53 nt, Homo sapiens
gagaggaaugaugacaaaguggcuuggggaaggagcacgugauuagaccucuc

SEQ ID NO: 1367 - RNA, 66 nt, Homo sapiens
gaccagcggcaccagagagagaaacaugagcaacaagcaccuucuucaacuguuucccccuccguc

SEQ ID NO: 1368 - RNA, 61 nt, Homo sapiens
gaggaggcggcaagcuggugucuggggcagugaggauuucagaugcagcuccugccuccuu

SEQ ID NO: 1369 - RNA, 76 nt, Homo sapiens
gcggagcuuccagacgcuccgccccacgucgcaugcgccccgggaaagcguggggcggagcuuccggaggccccgc

SEQ ID NO: 1370 - RNA, 76 nt, Homo sapiens
gcggagcuuccagacgcuccgccccacgucgcaugcgccccgggaacgcguggggcggagcuuccggaggccccgc

SEQ ID NO: 1371 - RNA, 64 nt, Homo sapiens
ggaugaguguacugugggcuucggagaucacgccacugcugccgcccgcugcccgccaccaucu

SEQ ID NO: 1372 - RNA, 84 nt, Homo sapiens
ggggauuguggggggucgcucuaggcaccgcagcacugugcuggggauguugcagcugccugggagugacuucacacaguccuc

SEQ ID NO: 1373 - RNA, 66 nt, Homo sapiens
uucucuccccaagcuccagcggcuuuaacccuuuaacuuggggccuugagacagcaggggacagaa

SEQ ID NO: 1374 - RNA, 72 nt, Homo sapiens
auguagguuucuaaugagacaaguggcagagauaccuuuauuuggaauugguagcaauaggggaagauacgu

SEQ ID NO: 1375 - RNA, 52 nt, Homo sapiens
ggcgggggcggcgcgcgcucguuggaacagcccaggcggcugcagccccgcc

SEQ ID NO: 1376 - RNA, 71 nt, Homo sapiens
ggccagcucgcgccgggcccucccccgcccucccgcggccgggggcgggggcggcgcgcggccggcuaacc

SEQ ID NO: 1377 - RNA, 80 nt, Homo sapiens
ggguuguucgagacccgcgggcgcucuccaguccuuuuaccucucugggcgguucgagacccgcgggagcucuccagucc

SEQ ID NO: 1378 - RNA, 73 nt, Homo sapiens
gacagaauagcaagcaaaagugguccaauauuacucagugcuuuggagaucccuucgugguugccaaaauguu

SEQ ID NO: 1379 - RNA, 91 nt, Homo sapiens
cccggcuguguggacaugugcccagggcccgggacagcgccacggaagaggacgcacccggcugugugcacaugugcccagggcccgggac

SEQ ID NO: 1380 - RNA, 91 nt, Homo sapiens
cccggcugugugcacaugugcccagggcccgggacagcgccacggaagaggacgcacccggcugugugcacaugugcccagggcccgggac

SEQ ID NO: 1381 - RNA, 91 nt, Homo sapiens
cccggcugugugcacaugugcccagggcccgggacagcgccauggaagaggacgcacccggcugugugcacaugugcccagggcccgggac

SEQ ID NO: 1382 - RNA, 166 nt, Homo sapiens
agauaucucccucuuccauuucaucaagacccagcugagucacugucacugccuaccaaucucgaccggaccucgaccggcucgucuguguugccaaucgacucggcguggcgucggucgugguagauaggcggucaugcauacgaauuuucagcucuuguucugg

SEQ ID NO: 1383 - RNA, 73 nt, Homo sapiens
uagauuuacaguccaaugcuucacucagccauuuuaccucacccccacugauguucgccgaccguugacuauu

SEQ ID NO: 1384 - RNA, 74 nt, Homo sapiens
gccggaggucauuaggagggcugagagggccccuguuaggggccaugggcuggguuuuacuauaugauaggcau

SEQ ID NO: 1385 - RNA, 93 nt, Homo sapiens
ccgcagcacugugcuggggauguugcagcugccugggagugacuucacacaguccucucugccuccagggucacccggaacgggguugcgggg

SEQ ID NO: 1386 - RNA, 98 nt, Homo sapiens
caggauaacacaguugguccgaguguuguggguuauuguuaaguugauuuaacauugucuccccccacaaccgcgcuugacuagcuugcuguuuugca

SEQ ID NO: 1387 - RNA, 126 nt, Homo sapiens
guagugguguagagaggcauuaagaacgcagguggcagggccagccaccaggagggcugcgugccacccgggcagcucugcugcucacuggcagugucaccugcggaaacucuccaucaucuaucc

SEQ ID NO: 1388 - RNA, 109 nt, Homo sapiens
ucuggaggggguaguagcugcuuuucaguguggguuugucacccuacuucuuguacgacucaaauguggccuuugcagcugaugauacagcuucuuuccccaucagauc

SEQ ID NO: 1389 - RNA, 102 nt, Homo sapiens
agugcagauagugguccucuccgugcuaccgcacuguggguacuugcugcuccagcagggcacgcacagcguccguggagggaaaggccuuuuccccacuuc

SEQ ID NO: 1390 - RNA, 171 nt, Homo sapiens
ccgcgaggcgcacugccagucucgcucggaccugcucaaggccggcgggggcgcgggcggcaguggcgggagcggccccucggccauccuccgucugcccaguuaccgcuuccgcuaccgccgccgcucccgcucuagcucccgcuccagcgagccgucgccgucgcggga

SEQ ID NO: 1391 - RNA, 53 nt, Homo sapiens
caucagaucgacccuguugaucucuacacuauuggccaguuuugucugaugca

SEQ ID NO: 1392 - RNA, 99 nt, Homo sapiens
agccugcagcgucccagagaguagccacuagccacaugucaguucaugcuuuuaaggcuauaugugccuaguggcugcugucugggauggugcagcucc

SEQ ID NO: 1393 - RNA, 78 nt, Homo sapiens
ugggacgcucagacgccgcgcggggcggggauuggucugugguccucucucggcuccucgcggcucgcggcggccgac

SEQ ID NO: 1394 - RNA, 108 nt, Homo sapiens
ugggugucagugggaagguugcgucauggacccagccagugaggcuaggacucccuggggaccccuggcagccccuccugaugauucuucuuccugagcacgcucaug

SEQ ID NO: 1395 - RNA, 91 nt, Homo sapiens
gucagacgugucauccccagauacaauggacaauaugcuauuauaaucguauggcauuguccuugcuguuuggagauaauacugcugacuu

SEQ ID NO: 1396 - RNA, 100 nt, Homo sapiens
aaugagugagaacucauaccgucguucucaucggaacugagguccagcacauugccucccccggggacuguaggagcgagggacaacuuccacugguucc

SEQ ID NO: 1397 - RNA, 91 nt, Homo sapiens; identical to SEQ ID NO: 1395

SEQ ID NO: 1398 - RNA, 122 nt, Homo sapiens
ccgacucuacagugcgacgggcggagcuuccagacgcuccgccccacgucgcaugcgccccgggaaagcguggggcggagcuuccggaggccccgcccugcugccgacccuguggagcggag

SEQ ID NO: 1399 - RNA, 81 nt, Homo sapiens
ugcgggcugagcgcgggcugagcgcugccagucagcgcucacauuaaggcugacagcgcccugccuggcucggccggcgaa

SEQ ID NO: 1400 - RNA, 131 nt, Homo sapiens
cugccucagccccccaaaaugcuucuguaccccugccccaacaaggaaggacaagaggugugagccacacacacgccuggccuccugucuuuccuuguuggagcagggauguagaagcacuugccgcagcc

SEQ ID NO: 1401 - RNA, 74 nt, Homo sapiens
gccuuuugucuacagauugcagcgauccuacauaaauauauggaggucucugucuggcuuaggacagcuggcua

SEQ ID NO: 1402 - RNA, 70 nt, Homo sapiens
ggugcaaaaguaauugcgguuuuugccauuaaaaguaaugcggccaaaacugcaguuacuuuugcaccca

SEQ ID NO: 1403 - RNA, 116 nt, Homo sapiens
uuggugaaaauguguugauuguaaugguuccuauucugaucaauaaacaugguuugagccuaguuacaaugaucuaaaauucacgguccaaaacugcaguuacuuuugcaccaacc

SEQ ID NO: 1404 - RNA, 116 nt, Homo sapiens
ggcugcccuggacuccccucccuccucccucccgccuccucgcccagggcccggcucaccuggcggcggggcgcgggacgccgcgggcgggacggcggggggcuccggggcgcucc

SEQ ID NO: 1405 - RNA, 84 nt, Homo sapiens
gcggcggcggcggggcgcgggacgcgggcgcuagcgggggagccggccccgggcgcggcggcuccgcgucugacugggcugcgg

SEQ ID NO: 1406 - RNA, 93 nt, Homo sapiens
uuuucccuucuucucacuacugcacuugauagucuuaagaaaagaauauuggagacuauuauuuuaagugagguaacucaggaauggaaaacc

SEQ ID NO: 1407 - RNA, 63 nt, Homo sapiens
gguccaaugaaucugaggaggcuacucaguagauagucccacccucacacgguucuuuaccuu

SEQ ID NO: 1408 - RNA, 93 nt, Homo sapiens
gcuggcauauaugaugacuuagcuuuuuuccccgacagaucgacuauguugaucuaacuuuucuaagccaguuucugucugauaugccagcuu

SEQ ID NO: 1409 - RNA, 130 nt, Homo sapiens
cggaagcucugcgccgugggggaaaugcagcagcgggguguggacgcgggcgggagaugcggaccaggaagugguucccgcuaccggcgcgacaggccgcagccgccgcccccagcgagggauguccgcg

SEQ ID NO: 1410 - RNA, 113 nt, Homo sapiens
cagccuguugaagcuuugaagcuuugaugccaggcauugacuucucacuagcugugaaaguccuagcuaaagagaagucaaugcaugacaucuuguuucaauagauggcuguu

SEQ ID NO: 1411 - RNA, 131 nt, Homo sapiens; identical to SEQ ID NO: 1400

SEQ ID NO: 1412 - RNA, 84 nt, Homo sapiens
ugucccgacacauaaucucugucucuuggaccugccaccaucacuuucugggucaggauuggaauugggauggaaugggacagu

SEQ ID NO: 1413 - RNA, 135 nt, Homo sapiens
cauuuuucuuucuaagcauauauaauuuauuuagauuggugcagaaguaauugcgguuuugccauggaaaguaauggcaaaaaccguaauuacuuuuguaccaaccuaauaauuucagccaacuauucauaugca

SEQ ID NO: 1414 - RNA, 144 nt, Homo sapiens
cagccuggaggcuuggguuuuuugagguuucuuugaaauccacuccuggcugggccacuggggucaaaaucaggauuugggccaggcaggacacagagugggggcggggagcggccaaaggcaggcugggcccccagagcugca

SEQ ID NO: 1415 - RNA, 56 nt, Homo sapiens
gaacauggcccuucucacugcacagaagaaguugggggcggggagcggcaguucuc

SEQ ID NO: 1416 - RNA, 69 nt, Homo sapiens
ggcucuuucugcugggccugcccuucacccucuacauggugagugugggggcggggagcggguggcucc

SEQ ID NO: 1417 - RNA, 70 nt, Homo sapiens
gccgcugcucgccgccguggaaggugagcgagcgggcgggcgggcgggcgaugggggcggggagcggccg

SEQ ID NO: 1418 - RNA, 142 nt, Homo sapiens
gggcacuccgggagauggcagcggauugggggcggggagcgggggggggcaaaggcggaggauuggucgagggcggagggacggggggucgcgggggugcugcugcacugcaccgggaguucgaggcuaccgcagcgcccag

SEQ ID NO: 1419 - RNA, 53 nt, Homo sapiens
uucaagcucugcaacagggggcaaagauuaaucuaccuugcaguguaggaauu

SEQ ID NO: 1420 - RNA, 88 nt, Homo sapiens
ucccggguguccagaaacgcaggcugaacgcuggagcccggggcguccucggugccggaagcggccgugcggccggagcuccggggag

SEQ ID NO: 1421 - RNA, 112 nt, Homo sapiens
ggucaaggcccugcugggagggaauguccgcaugaugcugucuggaggggccccgcuaucuccucagacacaccgauucaugaaugucugcuucugcugcccaauuggccag

SEQ ID NO: 1422 - RNA, 109 nt, Homo sapiens
ucauuuuccuuaucugcuuccuaguccuguacgcccuuuuccuaacacucacaacaaaacuaacuaauacuaacaucucagacgcucaggaaauagaaaccgucugaac

SEQ ID NO: 1423 - RNA, 78 nt, Homo sapiens
gcccaagcugcgggcccugggaguggagacgcggagcugcggucgccgcuuucugggcucgcucaccagcccgggugg

SEQ ID NO: 1424 - RNA, 117 nt, Homo sapiens
uccagggugcuguggccgccucacguauccagagugaugcagcucccuggggacacaggugcuuccuggggagcccugagcacuugucaguguugcuggccucaguccaauugggca

SEQ ID NO: 1425 - RNA, 83 nt, Homo sapiens
uggguuuugaauuugcaguaacaggugugagcauucuagcagcaguuugaugaucauguaugauacugcaaacaggaccuacg

SEQ ID NO: 1426 - RNA, 133 nt, Homo sapiens
uuaaagcauuccuuucuuuaauuuuguaauucuuuacuguggaauagcucagaaugucaguucuguuuuaaguaacagaauugauaacugagcaaggaaacguaauuuggauuauaaaauucuugcuuuaaua

SEQ ID NO: 1427 - RNA, 109 nt, Homo sapiens
cuccagauagcacuacgauguauuccgcuucugaacaggaucccaugccaguguggaacaccuucccaaucuuaguucagaaguggcuuguaugaccuguucagggguc

SEQ ID NO: 1428 - RNA, 71 nt, Homo sapiens
ccacuucugcagugucaguguggaacuguaucuauugcuccaguauccacuccugaccagcaggaauggca

SEQ ID NO: 1429 - RNA, 72 nt, Homo sapiens
cugugugccuuugcaacacugagcaacugggcuugcagugcucuagugauguguagugcuguaaccacagua

SEQ ID NO: 1430 - RNA, 71 nt, Homo sapiens
cagguuuguguuuccuggaguggccgaaagagaucaguucuaaccugcucugcaggaauaacgguccugcc

SEQ ID NO: 1431 - RNA, 63 nt, Homo sapiens
ucggcggggcugcgggaccgcgagugaguguggucgcuccugguucugccagcuccccugaga

SEQ ID NO: 1432 - RNA, 70 nt, Homo sapiens
guguugcuguuuguuggagcccuccaggaggaucuuggcacugagagaaaucccuaaacuagagucaugg

SEQ ID NO: 1433 - RNA, 61 nt, Homo sapiens
aguugauuuuauguauugcagcccauucaaaaauaaucuuguaaagcauaguguuugcuua

SEQ ID NO: 1434 - RNA, 76 nt, Homo sapiens
gguggcguggggcuggggcacccuccgacggcagagccuccuucagaaagugcagcucaagucuuaaagacaccaa

SEQ ID NO: 1435 - RNA, 55 nt, Homo sapiens
gguuuuguugcaauuguuuuugaggacuuggucauaaauucuuugccaagacuga

SEQ ID NO: 1436 - RNA, 79 nt, Homo sapiens
auuagguccacuugucaauuuuguuuuuguugcaguugcuuuugaggacucaucauaaauucuuugccaagacugaugu

SEQ ID NO: 1437 - RNA, 70 nt, Homo sapiens
uuuagcugacucgccacacuccacggaagcaauaugaaaugaucugcugcagugcucugagcccuaggau

SEQ ID NO: 1438 - RNA, 103 nt, Homo sapiens
ugagugauggagucccuggugcuuccuggagagaacaacaaaugguagucuugcaccaccuugauuguuaauauacuuggucuguggacuucccaugcucaaa

SEQ ID NO: 1439 - RNA, 125 nt, Homo sapiens
auuuauaaauguuuucuuuuuuaucuacuaacuaccuuguguugaaaucuagcaauuuaaugauaucuuuguugacucaggaguauguugcaagugagggugaagaagauccagaaguugaauuu

SEQ ID NO: 1440 - RNA, 121 nt, Homo sapiens
uuacuuuuuuuuuuuuuugggacagggucuugcuguguugcccaggcuggagugcaguggcaccauuucaccucacugcaaccuccaccaccaggguucaagcgauccucaugccuuaacc

SEQ ID NO: 1441 - RNA, 72 nt, Homo sapiens
acauaggaaauagauccucuuuuuuucuuucuuuuuuuuuuuuuugguuugggacagggucuugcuguguug

SEQ ID NO: 1442 - RNA, 92 nt, Homo sapiens
uuucuuuuugggacagggucuugcuguguugcccaggcuggucuugaacuccugggcucaagcgauucuccugaauugcuugagaagaaaga

SEQ ID NO: 1443 - RNA, 80 nt, Homo sapiens
gggucaucuucuccagggacauaaugggaaaggcuuuaucuaaugucuuuucucauuuaccucccuggaaggugucccuu

SEQ ID NO: 1444 - RNA, 89 nt, Homo sapiens
ggaguuucuaaaaguagacuguacgcuaagggucauaucuuuuuuuguuuugguuugugucuugguuggcgucuuaaauguuaauccua

SEQ ID NO: 1445 - RNA, 96 nt, Homo sapiens
agcauauuuugcgaguacucaacaccaacauccauguuggcagaaaauagccuuugccaucacugccauugagggugugggucgaagauaugcuca

SEQ ID NO: 1446 - RNA, 108 nt, Homo sapiens
cacaaguauauauuauguuggugaaaaaguaauugcuguuuuugccauuaaaaauaauagcaaaacugcaauuacuuuugcaccaaccuauauaagacauauugugca

SEQ ID NO: 1447 - RNA, 63 nt, Homo sapiens
gggcaagggaucugagugcagucagaccucauuuggguccagacuucauuccucuaugucucu

SEQ ID NO: 1448 - RNA, 87 nt, Homo sapiens
agcugccguuccagcgccuggugcgagaaaucgcccaagacuucaagaccgaucuucgcuuccagagcucugcggugauggcgcugc

SEQ ID NO: 1449 - RNA, 156 nt, Homo sapiens
ccugcuuccuguguggugaggggugaucagggcgagugagggaagcugugggaggagcccuuggcugcuggcagcaccggcuggagggcuccucucugcccaucccagcgaagcccuggagcccucagccccagcaagccccccguggagcaggug

SEQ ID NO: 1450 - RNA, 94 nt, Homo sapiens
agcccccgggcccugcgcccgcccgcccgcccgccaggccaggccgcccgcugaccgguccuggagcuguaggucgggucgcucccgaggcucc

SEQ ID NO: 1451 - RNA, 83 nt, Homo sapiens
uuucuucccacaacacuuucucggccuauccggaaugccccgacguuacucggacuaucccgaugcauacaccacaugaaaua

SEQ ID NO: 1452 - RNA, 162 nt, Homo sapiens
ucuguuagucuaugucagguugugucuaucaagacccgugucauuucaccaacuucucccuuucccagaagggucacuucuuuuucacuugcugggaaagggagaaguucauggaaugacgaacgucuugauuucauggaaugacgaaggucuugauagacu

SEQ ID NO: 1453 - RNA, 66 nt, Homo sapiens
ucuuuuaguuauugggccaguucaauugucuuacucaucaacuggaguguacccaaaacaaagauc

SEQ ID NO: 1454 - RNA, 93 nt, Homo sapiens
uggcugggaggggcagaacuguggacagauucucaaugccuuuuugaaguucugacccaccaaagaccuucugccuucacccuccuccccacc

SEQ ID NO: 1455 - RNA, 127 nt, Homo sapiens
cacuucggucgcgggcggugaggugcuguugcugaaacgcugccgcugaggguggacucgauuucccagggucccgccgcgggagucuccggcgggcgggcgcgcgcgagccaccgagcgaggugau

SEQ ID NO: 1456 - RNA, 98 nt, Homo sapiens
ggucugggugaauggccaucucagccuggagucagggcugggcucagacgaccagcagucuuugaccugccaugccgggagccacaucucgugaccag

SEQ ID NO: 1457 - RNA, 93 nt, Homo sapiens
caucucagccuggggucagggcagggcucagaauggucuggguggacggccgucucagccuggagucagggcagggcucaaggucugggugaa

SEQ ID NO: 1458 - RNA, 62 nt, Homo sapiens
agucagggcugggcugagaacgcccuggguggacggccgucucagccuggagucagggcugg

SEQ ID NO: 1459 - RNA, 62 nt, Homo sapiens
agucagggcugggcugagaacgcccuggguggacggucgucucagccuggagucagggcugg

SEQ ID NO: 1460 - RNA, 156 nt, Homo sapiens
gggaggugaggaugaauugcugguuuacuuauuacugaauuacuuauuacugguagugagucucuaagaaaagaggaggugguuguuuuccuccucuuuucuuugagacucacuaccaauaauaagaaauacuacuaaugggcauaagcuuccugu

SEQ ID NO: 1461 - RNA, 158 nt, Homo sapiens
ggccccuuuggaaaauagaggucguuaagccugaccacccccggggucaccucucuggccgucuaccuuccacacugacaagggccguggggacguagcuggccagacaggugaccccagagcggcguccccagguacuucuugcuuucuggugccug

SEQ ID NO: 1462 - RNA, 55 nt, Homo sapiens
guuacuucagggaguggcagaacugaagcacuggaucuaccucuccuagcagcau

SEQ ID NO: 1463 - RNA, 65 nt, Homo sapiens
caagugagguaaaaggcguugauccuaugauagauaauuuauuugccuuaggcuucuuucuugau

SEQ ID NO: 1464 - RNA, 69 nt, Homo sapiens
gggaaaaaaaaaaggauuugucuuguagccaggauauuguuuuaaagaaaauccuuuuuguuuuuccag

SEQ ID NO: 1465 - RNA, 77 nt, Homo sapiens
uggcuuugcgagggaguagggagcuggggucagacagcuacugugcuaacucugccucucccucugcagaucccacu

SEQ ID NO: 1466 - RNA, 56 nt, Homo sapiens
ugaguuaguaaaugcuugaugagaaugccauuuaggccuucagugucaagaucaag

SEQ ID NO: 1467 - RNA, 90 nt, Homo sapiens
cgccucccgcauccuccugcaacagccuggagcucccugugcaggacgcagcggggggcggggggcggucuuaggaggcugcggggcgca

SEQ ID NO: 1468 - RNA, 52 nt, Homo sapiens
uggaguugggaaaaacuuuucuuuggcccgguuuccucuucuuaacaccaaa

SEQ ID NO: 1469 - RNA, 106 nt, Homo sapiens
gagggaagcagcagccacagaguucuugccugacacaugggguaguagaugagaacguguaucuccuggaucuuaacucagugagcucuuguucuuuuccccuccu

SEQ ID NO: 1470 - RNA, 75 nt, Homo sapiens
uuguaucuccacaggaaguacaugaccugcucagugacuaugagcucaaauacuguuuuguggacaaauacaaag

SEQ ID NO: 1471 - RNA, 67 nt, Homo sapiens
agauuuguuugguuuguuaauuuuacgugacgcuuuuucacuguuuuguggacaaaucaugguuuuu

SEQ ID NO: 1472 - RNA, 59 nt, Homo sapiens
ggaccucggugccuggaaugagucuuccagccccagcuuguucuggcuucuagguucuu

SEQ ID NO: 1473 - RNA, 70 nt, Homo sapiens
uccugcuggccccgccugcugggggcuccccggcgcccccgggcccggccccggcggcgggggcaggagc

SEQ ID NO: 1474 - RNA, 54 nt, Homo sapiens
guggcaucagagaucaagagggaacugcucuguaucccacuucugacaccacgu

SEQ ID NO: 1475 - RNA, 57 nt, Homo sapiens
gugucagcuucaggauagguuuugaugugggaagaguuaagccuugaguuauuauca

SEQ ID NO: 1476 - RNA, 103 nt, Homo sapiens
cuguuuuaaagccaagaacacccuuucuuuguuccaaauuaacucuuagaagaaaccccacaaauaaagcaauucaaucaaggcuguucuauuuaaaucagag

SEQ ID NO: 1477 - RNA, 143 nt, Homo sapiens
ugccgggggaggggaguuguaagcagagcgcugagccucgcagcucgcauucggagggaagcugacauccacaccaagucgagacuuccagggauguggccggggagcagucacaugcuguagcuuucaugagcacaggcauc

SEQ ID NO: 1478 - RNA, 64 nt, Homo sapiens
ggaacugguagugucagccuccuguaaggaaccagagcaggagccagugccagcacaguuccag

SEQ ID NO: 1479 - RNA, 127 nt, Homo sapiens
cuugggaggcugaggcaggagaauugcuugaacccaggagacggagguugcagugagccauacaucaugucacccuugggcgacagagcgagacuccaacucagaaaaaaaagaaagaaagaaagaa

SEQ ID NO: 1480 - RNA, 164 nt, Homo sapiens
ucagcuacucgggaggcugaggcaggagaguugcuugaaccugggcgacggagguugaagugagccaagauugcgucacugcacuccagccugggcgacagagcgagacuccaacucagaaaaaacaaaacaaaacaaacaaaaaaaccccaaaucuuuugaaa

SEQ ID NO: 1481 - RNA, 70 nt, Homo sapiens
auuuuuaggcaagugucguggacuucguacugcuaggaagcuccguagucaccgacgagaccagaagugg

SEQ ID NO: 1482 - RNA, 91 nt, Homo sapiens
gguugaugaguacgcgccgcuggccgggacgcgccgggcaguagcugcgccgcaccuccucgcccagggccaccgacugcucggcggccac

SEQ ID NO: 1483 - RNA, 137 nt, Homo sapiens
ggauuagcacuuugucccuucgccuaacagccugugcuugggaaagacaaacucagaguucccuucuugugagcucagugucuggauuuccuagaauggccugaagcaauguuuggcagaauucaagcgggaucugg

SEQ ID NO: 1484 - RNA, 54 nt, Homo sapiens
ggugaugggcggcucuguguauccggcagacgaugagauguucuccgacaucua

SEQ ID NO: 1485 - RNA, 57 nt, Homo sapiens
uauuuuguugcgagguucugagcguugucuguguuuaaccuugauuucagucauguc

SEQ ID NO: 1486 - RNA, 92 nt, Homo sapiens
aggcgggcggccccgcggugcauugcuguugcauugcacgugugugaggcgggugcagugccucggcagugcagcccggagccggccccugg

SEQ ID NO: 1487 - RNA, 170 nt, Homo sapiens
augaggaaagaaaaaaauaauagacugagauugcuaagaccuacuguaagcaggucuaauaagaauuucuuuuucuucacaauuaugaaagaaaagaaauugugaagaaagaaauucuuacuaguuuugcugucaaaucucaaucuguaaaagugauaguuauaucgugu

SEQ ID NO: 1488 - RNA, 124 nt, Homo sapiens
ugaccugcugcuagacuguaacuuccuguuucugcaucacccuucuccacuuaagccguuucucugaaaacaaaugagauagaaaugcuggacacaggaacacucaguaugugccuguguuaac

SEQ ID NO: 1489 - RNA, 57 nt, Homo sapiens
ccgcccaggcggaacgauacggcagccccgcggcgccucgguuggccucggucggcc

SEQ ID NO: 1490 - RNA, 122 nt, Homo sapiens
gccggagggccggcccacugcugucacguggccuccauccgugcgcuuuauuggcuggugcuggcuuuacgggguugaauuuuggacgcugccugccauucgugggaccgaguuucaggcag

SEQ ID NO: 1491 - RNA, 55 nt, Homo sapiens
uuucuccaggccaaagccgcguuuuuccugcaaguuugggguguguagaggaaaa

SEQ ID NO: 1492 - RNA, 61 nt, Homo sapiens
uuuagcauuaaagaaucuuguuaugcuccccaggacgggcaugcacuuucucagcagagca

SEQ ID NO: 1493 - RNA, 66 nt, Homo sapiens
ggcagucggacuuccucgccccgcaaagcuucuuuuccuucaaggacgagggaccgcacuaguuug

SEQ ID NO: 1494 - RNA, 94 nt, Homo sapiens
aagaagcucuuucuguuacugaacuagaucgagucuauggaggucuuacaacuaaaguccaagaaucucuaaagaaacaggagggacuucuuaa

SEQ ID NO: 1495 - RNA, 80 nt, Homo sapiens
gccagugcucaaaagaaacaggagggaccgguaauguaaaaaucuggauuaguauucuauuucuggguauguauuggcau

SEQ ID NO: 1496 - RNA, 114 nt, Homo sapiens
ugauaaaugaagaagcucuuucuguuacugaacuagaucgagucuauggaggucuuacaacuaaaguccaagaaucucuaaagaaacaggagggacuucuuaaaaauauucagg

SEQ ID NO: 1497 - RNA, 54 nt, Homo sapiens
gaaagccgaaguugaguuggaaaagucuucuuaggagcagcucucagcauucag

SEQ ID NO: 1498 - RNA, 66 nt, Homo sapiens
ccuggagugagaccgagugcugacuuguuucugaugugauaaaaacacagcacucagcucugggug

SEQ ID NO: 1499 - RNA, 107 nt, Homo sapiens
gucgcggcccgggguucacgauguccgacgaggaagcgaggcagagcggaggcuccucgcaggccggcgucgugacugucagcgacguccaggagcugaugcggcgc

SEQ ID NO: 1500 - RNA, 118 nt, Homo sapiens
cugugcacacaaacuguuccuagguuguuagaugaaauugguuuguuauuccuauaguuuuuugguaucaaaauuaauguuuaaaauuucuuuagagaguuuuauggugacuuuuaga

SEQ ID NO: 1501 - RNA, 85 nt, Homo sapiens
uguuagguuggugcaaaaguacuugcggauuuugcuuuacuuuuaauggcaaaaaccgcaauuauuuuugcuucaaccuaauaug

SEQ ID NO: 1502 - RNA, 106 nt, Homo sapiens
cucuuuuaugaagaagaugaggcaggcucugcuacguccugccugugaaagaaucucuucaggaaaccagagcuucccucauuuaccuuuucuccuacaaagggaa

SEQ ID NO: 1503 - RNA, 112 nt, Homo sapiens
cgggcugcggcgcuucgggugcguggugugccgcuggaucgcccaggaccucagcagccuugcugggcuccuggaccaacacggcgugcgccuggugggcguagggcccgag

SEQ ID NO: 1504 - RNA, 60 nt, Homo sapiens
uugguggaccccaucuggucccacucauaaggagaacagaggcccuggggugugcuggga

SEQ ID NO: 1505 - RNA, 82 nt, Homo sapiens
cugcagcgccaacguccgagcgggcggccgagcucccggagcggccuggccccgagccccgagcgggcgucgcucagcagca

SEQ ID NO: 1506 - RNA, 168 nt, Homo sapiens
gccugucuucuucuucccacagccuggacugccucguggugggugggccccgggaguucaacgugacagugacugugagaaaugauggugaggacuccuacaggacacaggucaccuucuucuucccgcuugaccuguccuaccggaagguguccacgcuccagguag

SEQ ID NO: 1507 - RNA, 148 nt, Homo sapiens
acugaaaaugaaccagcaggucauccuuacauuaccuaaaagagcuucaguguuaggacugguacaagaagaaagcaagccuccuacauuuaggaaggacucuuuauagggcaagugguuuugagcuaagggaaguaugcuuuaguaa

SEQ ID NO: 1508 - RNA, 96 nt, Homo sapiens
uauuccaagcggcuuuuggaaaguggcuuugacccaaauauucgugacagcaggggcagaacaggccuucaccuugcagcagcucgagggaaugua

SEQ ID NO: 1509 - RNA, 58 nt, Homo sapiens
aguaaguggcacagccagggauugaacccaggucaucuggcuguagcauauuggcucc

SEQ ID NO: 1510 - RNA, 76 nt, Homo sapiens
ugcuggcaggcaccugagcagaacaucauugcugucucucuucgcagaagcugagcugacuaugccuccccgcauc

SEQ ID NO: 1511 - RNA, 53 nt, Homo sapiens
guuagcgguuaggcguacggccagggcuauugguugaaugaguaggcugaugg

SEQ ID NO: 1512 - RNA, 93 nt, Homo sapiens
ccagcuguggucucugagagacugaagauucgaggcucccuggccagggcagcccuucaggagcuccuuaguaaaggacuuaucaaacugguu

SEQ ID NO: 1513 - RNA, 124 nt, Homo sapiens
cagagagacuguuuucuaaguaccauaguguucccaaacaaaacugaggguugggcuucuauuucucaugggccaauaacgagauacacaugaacuaaggaggaagcgaguguguauuucugca

SEQ ID NO: 1514 - RNA, 115 nt, Homo sapiens
ccaggcgcugcugcgggccgugcgcugccacucguugacgccgaacuuccugcagaugcagcugcagaagugcgagauccugcaguccgacucccgcugcaaggacuaccugguc

SEQ ID NO: 1515 - RNA, 86 nt, Homo sapiens
ggacugauaaauugcaguuuauggauuccaguauucauauuuggaaaaaguaguacguggagccacauacauaguuugaaguucac

SEQ ID NO: 1516 - RNA, 117 nt, Homo sapiens
cggcucagccgcccgaggauugugaguggaccguugaggagagcgaccgaccauccggcugguguccggacucguacucuaugguuguccgcgcucugcgcuuccucucuagccgcc

SEQ ID NO: 1517 - RNA, 123 nt, Homo sapiens
agugaagaaauugagguuuaaagaggugcaguagcuugccugaccugaccuucauucucugcugacucacagcucauauuaguaguuuuguuucucuuucuccuuuaauaauugcgucauuac

SEQ ID NO: 1518 - RNA, 54 nt, Homo sapiens
guugucugaagaaugguuuuaugcccacaucauaccauuccuuggaugaaaccc

SEQ ID NO: 1519 - RNA, 65 nt, Homo sapiens
ucuguccagcagggggcaguaagugaucuugguaguaucccuggcugcuaagcccuuggcagggg

SEQ ID NO: 1520 - RNA, 69 nt, Homo sapiens
acaugcauuuucucugugaggcauauauuacaacuuucuugugcuuagggacacgagacagcacugugg

SEQ ID NO: 1521 - RNA, 99 nt, Homo sapiens
ugagaggaucacuugagcuugggugaggugaggcugcagugaguccugaucaugcugcugcacucaaucuuggacaacagagcaagacccugucucaaa

SEQ ID NO: 1522 - RNA, 67 nt, Homo sapiens
aguggaagcaaagaaagaagaauccgaggagucugaugaugacaugggcuuuggucuuuuugacuaa

SEQ ID NO: 1523 - RNA, 78 nt, Homo sapiens
aaaaggaaaaacaaagaagaaucugaggagugugaugauggcaugggcuuuggucuuuuugacuagaaguucuuuuau

SEQ ID NO: 1524 - RNA, 67 nt, Homo sapiens
aguggaagcaaagaaagaagaauccgaggaaucugaugaggacaugggcuuuggucuuuuugacuaa

SEQ ID NO: 1525 - RNA, 54 nt, Homo sapiens
aguaugugcaggagcugccucuggaagcagauggggcucugcgcuuugugcucc

SEQ ID NO: 1526 - RNA, 84 nt, Homo sapiens
cacaaucuaggucuuugccuuuucuuguauuuuauaugcauuuauguuaugaugcacagcagaagcaaaauauccauuuguggg

SEQ ID NO: 1527 - RNA, 71 nt, Homo sapiens
aguacuauauugaauaagaauggggagagugaacauccuuguauuguuccaguucuuacaggagaaacuuu

SEQ ID NO: 1528 - RNA, 71 nt, Homo sapiens
ugugcacaggcccuggaggucucccuggaaggcagaggaggccaggcugggaaggggcuucguggcacgca

SEQ ID NO: 1529 - RNA, 95 nt, Homo sapiens
aggcaggauugcuugagccugggaggucaaggcugcagugucguggucacagcuugcugcagacucgaccucccaggcuuaagcaauccuccugc

SEQ ID NO: 1530 - RNA, 64 nt, Homo sapiens
auaguacagagauguggcugugucuaguacaacuuuuagacacagaaaucugaaugacauauau

SEQ ID NO: 1531 - RNA, 80 nt, Homo sapiens
gauucagcaaaagucagcuggauauuauaauucauagcuugaagaaaugugacaucucccugcaauucuuguaagauccu

SEQ ID NO: 1532 - RNA, 91 nt, Homo sapiens
ccaggggacacggaugccaggaagugagagggggugagcagaauggagcuccagaggcuggacaaacccguguuugaucugaucccugggc

SEQ ID NO: 1533 - RNA, 78 nt, Homo sapiens
ggggcggacaucgcccugcuggagcuggaggagcccgugaacaucuccagccacauccacacggucacgcugcccccu

SEQ ID NO: 1534 - RNA, 80 nt, Homo sapiens
uggaaaccaaccuugugaggcugagcugggagagagaaaaauccugccaguccucccugccuacuucucuggauuccagu

SEQ ID NO: 1535 - RNA, 161 nt, Homo sapiens
gauauucauuugauuauacgggggagggucagggaagaacgaaccuugacguugcagugcaguuucacagaucguuguuagaucuuuauuuuuagccaugcacuguugugaggaaaaauuaccugucuugacugccauguguucaucaucuuaaguauugu

SEQ ID NO: 1536 - RNA, 134 nt, Homo sapiens
gcggggguucuggggucucgggcgccgccccgguuccgccugcggcucugaacguggggcucggcgggagcucgggcgggucugccccgcggagcgggucgccgggguggcgcgucgaggcuggugccccgcgg

SEQ ID NO: 1537 - RNA, 145 nt, Homo sapiens
aggaaacgaaacugugggggacucaguuuccaugauagggaaaccaggcaagaaauauugucuccucaaguugcgacgagacaguaguucuugccugguuucucuaucauggagucuugguuggacucugcuaugcgucucuuga

SEQ ID NO: 1538 - RNA, 72 nt, Homo sapiens
gccugggcuuagggcaggcagcgccagggagcgcgcggccgcuuccugguggguccaguguccccggggugg

SEQ ID NO: 1539 - RNA, 78 nt, Homo sapiens
gugggguuguaggcccguucuguguccugaggggcugugauccuaucaggacaggaauccagcucggagcuccuauua

SEQ ID NO: 1540 - RNA, 57 nt, Homo sapiens
gucuccugaaacuuugcuguaagugcuuauuaguuacaggcgauuuuuuguugauuc

SEQ ID NO: 1541 - RNA, 54 nt, Homo sapiens
ggcugcaggccuugugcccaaagcagcacugcugcugcgggcacgccgagcccc

SEQ ID NO: 1542 - RNA, 119 nt, Homo sapiens
gcugggaggguacaaguuggucauuccuaaaucugugugugagaaauggcaggucuaguuugggcauugugauugcauugcagauuacuaggagaagggaaugguggguacaccgguag

SEQ ID NO: 1543 - RNA, 87 nt, Homo sapiens
uagagaccaggauacagugggaguaagaaugaccacugggaguuugugacaaugcuugcugacacuuugucauccgaauacucuacc

SEQ ID NO: 1544 - RNA, 121 nt, Homo sapiens
cuguuuccuuguuugggucuugaguguagguuucugugucuucuaguccagugccugugggcucucgaacugauaaugucugucuccuaaaauccuuauuauuugcaaaaaggaggcagua

SEQ ID NO: 1545 - RNA, 102 nt, Homo sapiens
aagaagacagacccccagacagggaaagugcgugugagcggcgcacggugcaaggauguccucacagguaugccagguaucugggagggagguauuucuuag

SEQ ID NO: 1546 - RNA, 111 nt, Homo sapiens
cccguaguaaccccgagucugcggaaguggugacccgugggacgcggcugagacagguaaccuguucgcucccuguugggucccugccuuccucuccuccggcgucgggau

SEQ ID NO: 1547 - RNA, 122 nt, Homo sapiens
gcccucucauguggccaccgggcacucugugggccuggaggguaacugggugccagugaguggcauaaauguuaucugggugugagggggaggcagagaaaaggaaggcaaguggacggcca

SEQ ID NO: 1548 - RNA, 73 nt, Homo sapiens
agcagcccugcggggccuaccgccugccgcacgcacucccgccggcgcgcgcgcacucgcacucgcucgcucg

SEQ ID NO: 1549 - RNA, 76 nt, Homo sapiens
cggccggcgagcggcggaagugccgcggaguuggagcggggccggcgccgcagccgcuucugcuggcugagcugcu

SEQ ID NO: 1550 - RNA, 82 nt, Homo sapiens
ggaugucuuggccgggcacgguggcucacuuugggaggccgaggugggcagaucacgagguccggagaugaagaccauccug

SEQ ID NO: 1551 - RNA, 117 nt, Homo sapiens
uauuucaugccgggcacgguggcucacuuugggaggccaaggcgggaggaucacgaguucaagagaucaagaccauccuggccaacauggugaaaccccgucucuacuaaaaauaca

SEQ ID NO: 1552 - RNA, 62 nt, Homo sapiens
uucugccgggcacgguggcucacuuugggaggccgaggcgggcggaucaugaggucaggaga

SEQ ID NO: 1553 - RNA, 125 nt, Homo sapiens
auggguacuuuaaaaaucaugggcuguggccgggcacgguggcucacuuugggaggcugaggcagguggaucaccugaggucaggaguuugagaccagccuggccaacauagugaaaccccaucu

SEQ ID NO: 1554 - RNA, 67 nt, Homo sapiens
ggccgggcacgguggcucacuuugggcggaucacaugaggccaggaguucacaacuagccuggcugg

SEQ ID NO: 1555 - RNA, 131 nt, Homo sapiens
uuuuuauuaaaauguaaccagcuacagggccgggcacgguggcucacuuuuguaaucccagcacuuugggaggcugaggcgggcgagaccagccuggccaacguggcaaaaccccgucucuaauaaaaaua

SEQ ID NO: 1556 - RNA, 113 nt, Homo sapiens
guuucuguaaagugacaucuuucagauacuucguggcuuuucguauaugcauacccuugguggccugagcaguuccacgaguguucuuaaagugaacacgaagauuggaaccu

SEQ ID NO: 1557 - RNA, 88 nt, Homo sapiens
gggcggcugcgcagagggcuggacucagcggcggagcuggcugcuggccucaguucugccucuguccagguccuugugacccgcccgc

SEQ ID NO: 1558 - RNA, 91 nt, Homo sapiens
auaguauagcucauauucaacugauauaccauuacuaucacauuaugugauaguaucaugugauaucaguugaauaugagcuauacuauga

SEQ ID NO: 1559 - RNA, 115 nt, Homo sapiens
ccucauaguauagcucauauucaacugauaucacaugauacuaucacauaaugugauaguaaugguauaucaguugaauaugagcuauacuauuuucucuuuaaaguuugaggau

SEQ ID NO: 1560 - RNA, 52 nt, Homo sapiens
gcuuccuuucuguggggcugagucucagcucagcugccacugcugggagccc

SEQ ID NO: 1561 - RNA, 91 nt, Homo sapiens
augauucuguauugcauuacuaguuguccacucuaagggaugagcgugaaauugagugacucuggacuggagaagugauacuguaucauaa

SEQ ID NO: 1562 - RNA, 85 nt, Homo sapiens
ugcauauauaaugcuacuuucacugcuauaguaaaaugauccagauuuagucaccauagcuaagaaugugaaaaaggcuugcaag

SEQ ID NO: 1563 - RNA, 83 nt, Homo sapiens
gccugcggaagguaggauuagaucauuagcucagugaccuccuaggguuucgaugugcuauguucucauccuacaguugguuu

SEQ ID NO: 1564 - RNA, 91 nt, Homo sapiens
agugcuguggucacagugccagcuuacuuuaaugacucucaguuucagguuaccaaagaugcuggaacuauugcuggucucaauguacuua

SEQ ID NO: 1565 - RNA, 174 nt, Homo sapiens
ggcgccugcccuggucaccagccuggcugagguaugcuguugcgcuguccuuccucuggggagcaggcuccgggggacagggaaaagcacacaaggaacuuguccucuagggccugcagucucaugggagagugacaugcaccaggaccaccgcugugaagggcuaagugcugu

SEQ ID NO: 1566 - RNA, 151 nt, Homo sapiens
auggguaucuuuaagcaaagugaagaauuucagcuuaucagugauguuguaaaaauaaaugucugaacauaugaaugcaguauugauuucagcauuuaacugagauaagcgcauugaaaucuguuuaacaaaaauuaaaauguaugcaucg

SEQ ID NO: 1567 - RNA, 87 nt, Homo sapiens
aguaguagaauacuuucccuaugcuaucacgaaaauucuucuucaaaagcaaguagguugcauguggaaaugucugcuucucauucc

SEQ ID NO: 1568 - RNA, 109 nt, Homo sapiens
ccggcggggcgaagcccgcggcugcuggacccacccggccgggaauagugcuccugguuguuuccggcucgcgugggugugucggcggcggggccugacacccccggcc

SEQ ID NO: 1569 - RNA, 76 nt, Homo sapiens
gguuggugcaaaaguauuugcggguuuugucguagaaaguaauggcaaaaacugcaguuacuugugcaccaaccaa

SEQ ID NO: 1570 - RNA, 67 nt, Homo sapiens
ucgaaguaaagcucucggucaaguucaacagcaggaaguucagcuugaagaggaugccgucccgaaa

SEQ ID NO: 1571 - RNA, 98 nt, Homo sapiens
gcugcucaggagcuggccacuuugcuguugucccugccagcaccugccaguguccagcagcaguccaagagccuucuggccagccugcacaccagccg

SEQ ID NO: 1572 - RNA, 123 nt, Homo sapiens
uuggaagccuaccauuuauguccucuugagguaccugaauuaccaaaagcuuuauguauucugaaguuauugaaaauaagagcuuuugggaauucagguaguucaggagugacuuuucuaaaa

SEQ ID NO: 1573 - RNA, 94 nt, Homo sapiens
ucuaagaccaauuaagucacaaucccuggaggaaguaaaaggcauauuuuuaaaguuccccaggugauuccaaugugcagacaagucuagggac

SEQ ID NO: 1574 - RNA, 61 nt, Homo sapiens
cuguaaucacacucucuucuuacuguauuugggauaugaguuuggggaaagaguugcagua

SEQ ID NO: 1575 - RNA, 69 nt, Homo sapiens
uaguuuccuuuuguuccuugaguccacgcagaauuccauucucuggucagcagacaggcuuaagcuaaa

SEQ ID NO: 1576 - RNA, 57 nt, Homo sapiens
gcacaguguaauuaauucuuucauuguugaucauuguaaguuaggaugcauguguau

SEQ ID NO: 1577 - RNA, 126 nt, Homo sapiens
ggaaaagauggccacaugucugcuuuauaaccagaagagacaguaacagcccgggacagccuuucccaaaauaaaggccccugggcuguuacuguucccucuggcuguggccagccacuucucucu

SEQ ID NO: 1578 - RNA, 109 nt, Homo sapiens
ggugucuugaguaagccagagaguugggagagaagagaagagugcuugguaucuugacaaacccuccuaccuuuucuccuaacuacauagaucuugaaaaagccacuac

SEQ ID NO: 1579 - RNA, 181 nt, Homo sapiens
guguccuggguuuuggguggagaaagaguccccuagauaaguuauuaggugggugcaaagguaauugcaguuuuucccauuauuuuaauugcgaaaacagcaauuaccuuugcaccaaccugauggagucccccuugccaugcuucucucugugaaaaaccccaagccgaagucagcauaa

SEQ ID NO: 1580 - RNA, 139 nt, Homo sapiens
uaagcauacaacauaagugcucauuuaaguagucugaugccuacuacugaugacauacaauguaagugcucauuuaggcgucagacuaccuaaaugagcacuuacguuucaugucaauaaaaaagggaaaaggauuuau

SEQ ID NO: 1581 - RNA, 100 nt, Homo sapiens
uuucaucaggagcaaaugauaaacugaaauggugaggaagaauacgucuaacuguaaaaauuuuucugaaguugucuguuuuguuugguuuuaugggaca

SEQ ID NO: 1582 - RNA, 84 nt, Homo sapiens
uugguguuuaagaucaugcccaguugcuuccugucaccucuugacagguggugacugggcugcuguggggcuggagcagcgagg

SEQ ID NO: 1583 - RNA, 82 nt, Homo sapiens
ccaggggcuuauccuggacaggcaccuccaggcgccuacccuggagcaccuggagcuuaucccggagcaccugcaccuggag

SEQ ID NO: 1584 - RNA, 72 nt, Homo sapiens
cuaggguggaguguggguugaguccagaacccgacauugagagauggacucucccuacuaucuucccuaggg

SEQ ID NO: 1585 - RNA, 62 nt, Homo sapiens
ugguccugcgucggagaggugguaugcagaucuucgugaagacccugaccggcaagaccauc

SEQ ID NO: 1586 - RNA, 59 nt, Homo sapiens
uguucgggguggccaguuuuuuauguaugcaaauugacgauugagcacagucaggcauu

SEQ ID NO: 1587 - RNA, 103 nt, Homo sapiens
cauuugcuaaugauuaauacacuguuugggcuggccaguuuuucaugcaugcagcuugacgauugagcacagucaggccuuuguauuaaaaaugaaaaaugaa

SEQ ID NO: 1588 - RNA, 69 nt, Homo sapiens
uuuugccgugugucuugcauaauucauggccaguuuuaugaagcuuuggaaggcacuauggacagaagc

SEQ ID NO: 1589 - RNA, 70 nt, Homo sapiens
ggcccucggcugagcucuuccccaucaucguuagccaggacugcgggcacgaggagacggcccaggccau

SEQ ID NO: 1590 - RNA, 129 nt, Homo sapiens
ugguuuacacuuuaugccggaugugcuuuucuccaauaucagugcucgagacacagugaagcaaauuaaaaaaaaaaaaaaaaaaaaucccugaaugaugauuagagacaucaccgcuaaaaaacuaca

SEQ ID NO: 1591 - RNA, 61 nt, Homo sapiens
cuuugccuuccugaaaaguuuuucuuuugauucuacauauuuucaggggagggauaaagau

SEQ ID NO: 1592 - RNA, 63 nt, Homo sapiens
gugucuuugauuugcauuuuauuaacaucgauuggcguauuaaaagucccucugagcuuaccu

SEQ ID NO: 1593 - RNA, 103 nt, Homo sapiens
acaucgauuggcauauuaaaagucccucugagcuuaccuucucuaaaaaaauguaagaaaaagagccugugggaaggacugugaggcagaggggcugguguga

SEQ ID NO: 1594 - RNA, 103 nt, Homo sapiens
acaucgauuggcauauuaaaagucccucugagcuuaccuucucuaaaaaaauguaagaaaaaaggccugugggaaggacuaugaggcagaggggcugguguga

SEQ ID NO: 1595 - RNA, 101 nt, Homo sapiens
ugaggcaggagaauugcuugaauuugggaggcggagguuguagugagcuaagaucgugccacugcacuccagccuggacaacagagugagacugugucgca

SEQ ID NO: 1596 - RNA, 57 nt, Homo sapiens
auugcgccacuguacuccagccuggcaacagagugagacugugucgcaaaaaaauaa

SEQ ID NO: 1597 - RNA, 61 nt, Homo sapiens
cugagucacaauggauugcugguuguggacaaucugcagguagugccuuuggagaccagug

SEQ ID NO: 1598 - RNA, 129 nt, Homo sapiens
gacaggcugcugauaugcugccuuuggucucugagccaccagguauagcgcugcauaauggaagaacagaugaacauaagagugucuuggggaagaugagcacaagacaucaugggguuguauuguuac

SEQ ID NO: 1599 - RNA, 76 nt, Homo sapiens
aaaaugcagguugcugggcuuugccccauggacugaauccagaguucacgggggagcccaggaaccuguauuuuuc

SEQ ID NO: 1600 - RNA, 54 nt, Homo sapiens
aguggagcaguggaaggguacugugcucgagcagguuuccgugaagcccacucu

SEQ ID NO: 1601 - RNA, 84 nt, Homo sapiens
augcaaaaguaaucgcgguuugugccagaugacgauuugaauuaauaaauucauuugguauaaaccgcgauuauuuuugcauca

SEQ ID NO: 1602 - RNA, 89 nt, Homo sapiens
uucccggacuauaaagagagccgccggcuucugggcuccaccacgcuuuucaucugucccgcugcguguuuuccucuugaucgggaacu

SEQ ID NO: 1603 - RNA, 78 nt, Homo sapiens
ucaaguacgcaaucucuguaaacccacuagaaccaguccauggucggugggcuucuuaacaggagaaaguuacugaaa

SEQ ID NO: 1604 - RNA, 56 nt, Homo sapiens
ggagcaggaaguggcggugcgagggcugcugcacagcgagcggagccgcgguccgg

SEQ ID NO: 1605 - RNA, 87 nt, Homo sapiens
cccaugagguaaauuaauacucagccaagcagagugaggcccugaugcucuugugguucugccauuaauuugcuguaacccagggac

SEQ ID NO: 1606 - RNA, 110 nt, Homo sapiens
ccggaugugacguugaccuaccuuagucacauuguuagggaaggaagugugccgcgccuaccuaucugccccgccuugagucucagccagucggcgucuccauccuggcg

SEQ ID NO: 1607 - RNA, 77 nt, Homo sapiens
uaucugaaacacuuccuaugcaggcuggggugaagguguccuuccugcuccuggguucagugaggaauuuagauguc

SEQ ID NO: 1608 - RNA, 79 nt, Homo sapiens
cauagauaaucugggugccacaguggaucuguauauucuuaaucaucuaaugaacccacccaauggaaaacgcugugaa

SEQ ID NO: 1609 - RNA, 60 nt, Homo sapiens
ccuaaggguuguagagggacaaaaauccaucuuuuguaacuucuucaggccgaauaggug

SEQ ID NO: 1610 - RNA, 93 nt, Homo sapiens
uuuaacuauucuuuucauagagcaguuaggaaacacucuguuuguaaagucugcaaguggauauuuugaccucuuugaggccuucguuggaaa

SEQ ID NO: 1611 - RNA, 71 nt, Homo sapiens
gccggccgaggucucgccgccggcgcccuggggaccucguggguguggccggcggcgaccucggcaggcga

SEQ ID NO: 1612 - RNA, 54 nt, Homo sapiens
auucuugugcuaagcagaacuguaaaauaguuaaaaugucuuaucaaguaauuc

SEQ ID NO: 1613 - RNA, 66 nt, Homo sapiens
auugauugcagccguauccagaagaaagggaacaaauguuuugcugauucuacugccaagaaguag

SEQ ID NO: 1614 - RNA, 94 nt, Homo sapiens
cacauccuugaugcaacuuuuguuggaagcugaagugcggcagcucaccuugggagcauuacagcaguucaacuuggacgucagagaaugugaa

SEQ ID NO: 1615 - RNA, 56 nt, Homo sapiens
ggcuucaaggucaagaaugugucugucaaggauguucgucguggcaacguugcugg

SEQ ID NO: 1616 - RNA, 56 nt, Homo sapiens
ggcuucaaugucaagaaugugucugucaaggauguucgucguggcaacgucgcugg

SEQ ID NO: 1617 - RNA, 56 nt, Homo sapiens
ggcuucaaugucaagaaugugucugucaaggauguucgucguggcaacguugcugg

SEQ ID NO: 1618 - RNA, 56 nt, Homo sapiens
ggcuuccaugucaagaaugugucugucaaggauguucgucguggcaacguugcugg

SEQ ID NO: 1619 - RNA, 54 nt, Homo sapiens
gguuagguuucgagcuuccuggccguaagcgauaaggcuuuaacugagaaccac

SEQ ID NO: 1620 - RNA, 131 nt, Homo sapiens
gugaggaaguagaagcagugaauguggaugacauuuugaggaauucugccaugaagaagaauacacggaaggggaggaggugaaggggauuuuuuuaaaagcaauuuaaaaguuuacuggaaugucucaua

SEQ ID NO: 1621 - RNA, 59 nt, Homo sapiens
cauaugagaggcaggcugagaccaauuuucuaccaggccagcuaauucaucacaaugac

SEQ ID NO: 1622 - RNA, 59 nt, Homo sapiens
cccaucuuucauggaaaggauuugguuccaggaucucccaguucugugucucuugggaa

SEQ ID NO: 1623 - RNA, 52 nt, Homo sapiens
agaaucucugugugugaacugcaggcaucuguaguuuuuacaaagcuucuaa

SEQ ID NO: 1624 - RNA, 61 nt, Homo sapiens
gcagguccuguguucacuggucacuuccacagccugaagccccucgaaaggacaucugcac

SEQ ID NO: 1625 - RNA, 107 nt, Homo sapiens
ugacuccguguggccacguggcuagcacagcugcagggacaugcggacugaguauaucagugugccucugcuggccagugugacguugauguggugugagggucaga

SEQ ID NO: 1626 - RNA, 132 nt, Homo sapiens
ugauguaaguuaagggucuaacuucauucuaucccauguggauauuccauuuuuccagcacuguuuguugaaaagaccauccuuucuucauugaauggucuuagcacucuuguugaaaauaauuugaucaua

SEQ ID NO: 1627 - RNA, 91 nt, Homo sapiens
uagauaaacaguuuuaacaagagcauuugucaaaaagacuguccuuuccuccauugaauggucuuagcacucuuguuaaagauuauuugac

SEQ ID NO: 1628 - RNA, 60 nt, Homo sapiens
ucgcuagcuucuagucaccucggcucuuccucagccccgggagguacagaauuggcgaga

SEQ ID NO: 1629 - RNA, 55 nt, Homo sapiens
ugggugcuguaggcuuugagugcagaggcaagaaccauggaguauuauucccaua

SEQ ID NO: 1630 - RNA, 90 nt, Homo sapiens
agacacagcuuccggcggaagcucuuaccgcacacgccacaccggaagugccucuguacccgagggcugcuccacggcaucugcgucucc

SEQ ID NO: 1631 - RNA, 52 nt, Homo sapiens
ccugccuaggcgucuggcguccguuugucuguccgaggccucagcgcaggua

SEQ ID NO: 1632 - RNA, 62 nt, Homo sapiens
gguuucgauggacgaggacucaaggcagaaaauggacaauuugaggaauuuggccagacuuu

SEQ ID NO: 1633 - RNA, 57 nt, Homo sapiens
ucugcaaaccagccagaaauugaccagcauuuagcaaugaugguugcuuugcaggag

SEQ ID NO: 1634 - RNA, 98 nt, Homo sapiens
uucgccgucuggcgagcccuuagccuugcuguagagacuuccgucacccuugguagaguuuauuuuuuugauggcuaagauacugcugaugcugaaau

SEQ ID NO: 1635 - RNA, 87 nt, Homo sapiens
aaaccauguaagggcuggauugaggcuacaaauuucagggagaacuuuuuucucuauucagugccaaguuguuuauagcugguuuuc

SEQ ID NO: 1636 - RNA, 75 nt, Homo sapiens
agaaaauuacagcuaucuuagucuaaaaugugcuauuauuaaaagaaauuuugguuaaauauuaugugagucuaa

SEQ ID NO: 1637 - RNA, 62 nt, Homo sapiens
ucuuugcucaagagaagagcucaaccacagucaaggcucugccacucuacaauacagggaug

SEQ ID NO: 1638 - RNA, 126 nt, Homo sapiens
acaagggagccacaaggggguucuguagcuucuuggcucagggcaccuagcauuuugaacucaagccagucccaaggguuuggugaucucagcugaguccucacugccagccugaauccucuguca

SEQ ID NO: 1639 - RNA, 78 nt, Homo sapiens
guucagucccaaggguuugguuguuuguuuauucuaauguguugcugcaauaggaaacccaaagcuagggcuggacgc

SEQ ID NO: 1640 - RNA, 75 nt, Homo sapiens
agcaacaacacugccaguuccguugcccugucauucggcauggcaaaggaaauuuggcucugugcauuuugcuuu

SEQ ID NO: 1641 - RNA, 55 nt, Homo sapiens
accugaagggccuugacgaucuggacgccgaugccgaugauggcugggcaggugg

SEQ ID NO: 1642 - RNA, 97 nt, Homo sapiens
gggcgcaccugggcccgccccuggugccggggaagaggcggggcuugcgcgggccucgcccccaacagaaccuggcggggcggggcggggcgucugc

SEQ ID NO: 1643 - RNA, 97 nt, Homo sapiens
ggggcggggccggcggcggggaacgaccguugggucgcgggauggggagggacccggcuggcggggcggggcggagccggcuguugcccagacccac

SEQ ID NO: 1644 - RNA, 81 nt, Homo sapiens
cccggccggccguagccgccaguaccguguggaagcgugagagucgagggguggcacgugacuggcggggcggggcggggc

SEQ ID NO: 1645 - RNA, 157 nt, Homo sapiens
ggaggccgcccaggaagaggaagcugugagaagugagaagaggcgauaaaggaagagggcagagcuggcccgcugcugugaccggguagcaccguggaaagcgcccaugcccagcuccauggcucgcugugggugacccugugcacuaagcuucuga

SEQ ID NO: 1646 - RNA, 112 nt, Homo sapiens
cuaaugaguuuuauguaaguuauauggucuuaauuugguacuuguaaauagcacuaguuagacucuuuagaauacuccaagaguuagggcagcagaguggagcgauuuagaa

SEQ ID NO: 1647 - RNA, 70 nt, Homo sapiens
gcugacuggggcgggcggcggaggggcggggaaggagggggcucccagggcagccuggcccagggagcag

SEQ ID NO: 1648 - RNA, 57 nt, Homo sapiens
ggcugcugguccggggucgcccgcggggccgggcggcggaggggccggggacgccgg

SEQ ID NO: 1649 - RNA, 86 nt, Homo sapiens
augcuuuuaaguuuuuauuucuaauccuauaugccccuggacguaguuaagaggcuucaugggccagaaauucccauuuugcauau

SEQ ID NO: 1650 - RNA, 53 nt, Homo sapiens
ucuccuggggacagcuucuggggauaagccaaagccuccaccaccuggaggac

SEQ ID NO: 1651 - RNA, 72 nt, Homo sapiens
cacagacugaagacuacacucucagcuucucuacuuuugagauuuugggauucaggcuggcuuccuugugca

SEQ ID NO: 1652 - RNA, 93 nt, Homo sapiens
uauuuccacaugcagagcagcuugugggcuagaagcagaugccagugguuacauaguagcaaggguuuuagacuacacucucagggaaauguu

SEQ ID NO: 1653 - RNA, 112 nt, Homo sapiens
uacuguuuugggaugguuagaaaugcaacaguagauagcagagauauuuugauuuuuguaauuuuuugcuguaaccgucuucuacuacauuaaauuaucuaaaacaugugaa

SEQ ID NO: 1654 - RNA, 75 nt, Homo sapiens
ucuaauaucuaagcuuacugcucuggguuagagccuaucucuucuacuuagaugugugccccaauauguuagaua

SEQ ID NO: 1655 - RNA, 85 nt, Homo sapiens
uuugggaguaaugugugcucuguaaguuuguuuuaaauugcacuguuuuuaaagaaacuguagaggagcaacaaaaauccaagca

SEQ ID NO: 1656 - RNA, 95 nt, Homo sapiens
gugaagcuggagaauccaccucugagcucacucgcugguugcuggcaggccuuaguccucaacagcugugggccagaggcuucaguuuccugcca

SEQ ID NO: 1657 - RNA, 81 nt, Homo sapiens
gccugcuacgaguagaacgcuguccgcagcuugcgcauuucgcagccgcugccgccucgccgcugcuccuucguaaggcca

SEQ ID NO: 1658 - RNA, 140 nt, Homo sapiens
uuaggucucuccucccuuuagcaaucuucuucuagagccauuucacugcucgguuucaaucauguccaauggaaacaggaaacagagccaguuugacugcuuauuugaacucuauggcugauuaugcccugacacugaag

SEQ ID NO: 1659 - RNA, 105 nt, Homo sapiens
gcugcuguccucaucggaggccagugcccugggccaccucagcuuccuggagcagcagcagagcgaggccagccuagagguggcuucuggcagccacagcggcag

SEQ ID NO: 1660 - RNA, 77 nt, Homo sapiens
cagcgucugguacgugagaucgcgcaggacuucaagaccgaccugcgcuuccagagcucggcugugauggcgcugca

SEQ ID NO: 1661 - RNA, 73 nt, Homo sapiens
ggaguacgugcagcagcugaguggcuauuuccugcagcugaaauuugacccagagcugcuguucgguguccag

SEQ ID NO: 1662 - RNA, 55 nt, Homo sapiens
caacaauuuuaaaugaguaauacugagauggaggacaaguuugagaauuuuugcu

SEQ ID NO: 1663 - RNA, 101 nt, Homo sapiens
acggguggcccucaacacgcuggcccgcugcaguggcauugccagugcugccgccgcugcaguggaggccgccaggggggccggcuggacugggcacgugg

SEQ ID NO: 1664 - RNA, 86 nt, Homo sapiens
uacauugucuaggcugggcucgaacuccuggacucaaguaauccaccugucucggccucccaaaguccuggaauuacaggugugag

SEQ ID NO: 1665 - RNA, 70 nt, Homo sapiens
cugccagggcggugucugagccugccggcgccaccugggccccggcccuugagguacucccugagcagga

SEQ ID NO: 1666 - RNA, 58 nt, Homo sapiens
ucaguccuguuguuugcgagcaaaaauugacaugaguaguaacaauggaugcaugaga

SEQ ID NO: 1667 - RNA, 106 nt, Homo sapiens
ucagugaguuccaagcugggauugagaagggagcagugaagggaccgggagguuauacuuuccucugaugacuuccuguuagugccacgugucugggccacugaga

SEQ ID NO: 1668 - RNA, 89 nt, Homo sapiens
aagcuauggauugguaguguuuuuguccuuugggguauacaauaaauauuugguuuucagaccuaggaaauacucagaugaaugcuuuu

SEQ ID NO: 1669 - RNA, 61 nt, Homo sapiens
uuagaggcugucuuuucagcuguaaugguggcuauccugcugaagcuuggaacuucuggac

SEQ ID NO: 1670 - RNA, 57 nt, Homo sapiens
uaucuuacugucauuguccuaaaaccuuauuuuagaaaauugaucaaguaacauguu

SEQ ID NO: 1671 - RNA, 74 nt, Homo sapiens
uuugaggauauggguuuguuguccaaacuguuuuuagaaauggacuuacaugaccuaagaccuguucuuaaaaa

SEQ ID NO: 1672 - RNA, 81 nt, Homo sapiens
gggcacacacagggucacgccguuaccggaggcuucaguggaggaaguaaugcugagccugcgaggccugacaucgcuuac

SEQ ID NO: 1673 - RNA, 84 nt, Homo sapiens
cacauugggucacgccauuacugggggcuucaguggaggaaguaaugcugagccugcgaggccugacaucacuuaccagguggg

SEQ ID NO: 1674 - RNA, 100 nt, Homo sapiens
cuggcguggcugugggcucugcugugggucacgccauuacuggggcuuucaggggaggaaguaaugcugagccugcgaggccugacaucacuuaccagga

SEQ ID NO: 1675 - RNA, 61 nt, Homo sapiens
gucaugccauuacugggggcuucaguggaggaaguaaugcugagccugcgaggccugacau

SEQ ID NO: 1676 - RNA, 73 nt, Homo sapiens
uauuaggagugcucuguuguuuacaaacucagguacccgcagggccuagcaagagacuuaaaugacugauaag

SEQ ID NO: 1677 - RNA, 126 nt, Homo sapiens
ucguauugggcgccuggucaccagggcugcuuuuaacucugguaaaguggauauuguugccaucaaugaccccuucauugaccucaacuacauggugagugcuacauggugagccccaaagcuggu

SEQ ID NO: 1678 - RNA, 131 nt, Homo sapiens
gagguguacgacaagaucugcaaggccgccaggcacugagcuggagcccgccuggagagacagacacgugugaguggucaggcaucuucccuucacucaagcuuggcugcuuuccuagauccacacuuuca

SEQ ID NO: 1679 - RNA, 74 nt, Homo sapiens
uucaacucuucaucggcugagagggcguaggaaucaugucuuuccuacucaucgguugaugguaugcucgaaca

SEQ ID NO: 1680 - RNA, 85 nt, Homo sapiens
agaaucccuguaggcagugcuaaaaaauaauuuaagcauuucuaaauguguuucuuugaagucauugaucccuuugguuuucuag

SEQ ID NO: 1681 - RNA, 77 nt, Homo sapiens
agugguccuccaccagaucagaccuguugauagaugaaaacugucugcuuucuccucuggcgggagaagacuauucu

SEQ ID NO: 1682 - RNA, 116 nt, Homo sapiens
gcggggggcaaccugguaugugaggugaaaccaaaagcacaaagcuuaguugugagucaucuguugaugaauccacugugccacugaucccuucaugaaccccuugcccacugcua

SEQ ID NO: 1683 - RNA, 92 nt, Homo sapiens
uggguuacagugaccggcagcacaggagagauuggcuuccccuuuuugaaggugaacugggucuuuuuuguccuuuuuuuaaguagccuaaa

SEQ ID NO: 1684 - RNA, 58 nt, Homo sapiens
gccgggggcggggcgcggcggcugucagcugacuguggcggcggcggccucgagguga

SEQ ID NO: 1685 - RNA, 72 nt, Homo sapiens
ucagcugaaucuccagggaggcugcagagcaucguggagaccacuuucugccucggccuuuaaaugcugacu

SEQ ID NO: 1686 - RNA, 97 nt, Homo sapiens
uucuucacuuuaaagaguggcaaagucuuuccauauguguaacagacauacauacauacauauggaaagacuuugccacucuugaaagugaagagug

SEQ ID NO: 1687 - RNA, 73 nt, Homo sapiens
aagaguggcaaagucuuuccauauguauguauguaugucuguuacacauauggaaagacuuugccacucuuua

SEQ ID NO: 1688 - RNA, 57 nt, Homo sapiens
ggcugccuagguccagugcccagggaggaccaggcggaggccuggggcugcagcugc

SEQ ID NO: 1689 - RNA, 103 nt, Homo sapiens
gggcuuuguguuggggccucucaugguugcugccucugggggacucuguccucagacacagggucccgcaggggaaucauccugagagcuuccuggggccccu

SEQ ID NO: 1690 - RNA, 60 nt, Homo sapiens
cuggaggagcuggaggugcuggagaggaagcccgccgccgggcuguccgcggccccagug

SEQ ID NO: 1691 - RNA, 77 nt, Homo sapiens
uccagcagaaaacaagcacaagcuuccaguuguacccucaauaugaaccgugcguguuugauucuuugacaugggag

SEQ ID NO: 1692 - RNA, 53 nt, Homo sapiens
aagagagugagccgcaauuguucugaaaaugucaaacgaggcuucuguuuugc

SEQ ID NO: 1693 - RNA, 104 nt, Homo sapiens
ccauucaaauauaccacaguuuguuuaaccuuuugccuguugguugaagaugccuuucaacaggugacugguuagacaaacugugguauauacacaggauggaa

SEQ ID NO: 1694 - RNA, 62 nt, Homo sapiens
gugaauaugcggcucuuguguucagggucuuguugggcagccagaggaaugcauggacacaa

SEQ ID NO: 1695 - RNA, 135 nt, Homo sapiens
gccaucuuuguugaugugucagcuccgcagggguuuggggaaacggccgcugagugaggcgucggcuguguuucucaccgcggucuuuuccucccacucuuggcugguuggaccccgcuauggaaaaguuggccc

SEQ ID NO: 1696 - RNA, 101 nt, Homo sapiens
uguacaacaguuggcacauuuuagagacaaauuucccaccaucaucucccaaauuacacugauaaaauccugucacugcaauggcauucuggaugaacauc

SEQ ID NO: 1697 - RNA, 86 nt, Homo sapiens
gguauuugcuucauaggcaguuugacugcauguauuagagaaugaaaagaagauauuuguaguaaugccuggaaacuuggugcuuu

SEQ ID NO: 1698 - RNA, 86 nt, Homo sapiens
cugaaacgcaugaccucguggguccugaacugaccucuggucacaacacccagggccugguucucccauuggguaaaucuucaggu

SEQ ID NO: 1699 - RNA, 113 nt, Homo sapiens
ugggggucacugacccugcuugguggggucccccuuguaacaauaaaaucuauuuaaacuuuacuucagaaauucauugugccuucccuccugccugggcucaugccuccacu

SEQ ID NO: 1700 - RNA, 84 nt, Homo sapiens
ugugacuugaggauaggguuaaagucaaauuaccacuuuuuuuuuuuuuuuuuuuuuuuuuuuuuuuugucuuuuggaaacagu

SEQ ID NO: 1701 - RNA, 95 nt, Homo sapiens
gaugugaauguaggauucguaggagcugagcauuugugcuucaggcaucaaguugucuuugacucuucgacucuuccuuggucuuuuuccauucu

SEQ ID NO: 1702 - RNA, 102 nt, Homo sapiens
accuagggagcuucaaacgacaaaugugcagccacgcccuccagcaagucucaauguguuggucuuugggaggcccgagcauucugaagugcggcuggguuu

SEQ ID NO: 1703 - RNA, 132 nt, Homo sapiens
cagggacugugaaacucacuagaucuguuaggcuggugcaaaaguaauggcgguuuuugccguuaaagguaauugcaaaaaccgccauuacuuuugcaccaaccuucagguucgggucuacgcagcuuuguc

SEQ ID NO: 1704 - RNA, 52 nt, Homo sapiens
uaggcuggugcaaaaguaauggcgguuuuugccauuacuuuucauuuuuacc

SEQ ID NO: 1705 - RNA, 79 nt, Homo sapiens
ggcuuauguuuuauuaggcuggugcaaaaguaauggcaaaaacugcaauuacuuuugcaccaaccuaauauauugccaa

SEQ ID NO: 1706 - RNA, 97 nt, Homo sapiens
gcagaacgcagcccgcuccuccagggcccuccaggcccuccggccccgggccggcgggugaacuggggggccccgggacaggccgagcccucugccc

SEQ ID NO: 1707 - RNA, 60 nt, Homo sapiens
uccagggcccuccaggcccuccggacccgggccggcgggugaacuggggggccccgggac

SEQ ID NO: 1708 - RNA, 152 nt, Homo sapiens
gccugcccucuuuggacagcagcuccaggacagggcgggugggcugaccacccaaaccccaucugggcccaggccccaugccccgaggagggguggucugaagcccaccagagcccccugccagacugucugccucccuucugacuguggcc

SEQ ID NO: 1709 - RNA, 121 nt, Homo sapiens
aagcaagaccaacagucuccccucauggaaggcccacugaucuaaaaugcugguuccuuuuggaccuucagggcacuugggggagaccuuccugaggugcugugcagugucugguguuucu

SEQ ID NO: 1710 - RNA, 110 nt, Homo sapiens
gguauuuugaugcuuugcuggcuggugcagugccugagggaguaagagcccuguuguugucagauagugucuuacucccucaggcacaucuccagcgagucucuugcucu

SEQ ID NO: 1711 - RNA, 102 nt, Homo sapiens
ggccuguguucaucuguuucgugaggcucucagcaaguccuuccaguguggaaacucauguccuauccugggaguuucuugaaacauuccuuuucuugcccu

SEQ ID NO: 1712 - RNA, 89 nt, Homo sapiens
uguuucgccaagugcacucaccauacuucuguaccuuuccagugccccaccuuagaacaguaugccaugagagcguuugccgacgcacu

SEQ ID NO: 1713 - RNA, 89 nt, Homo sapiens
gggcucucccuuuccccucucuccuccaucuguaacccucucacucccagcuuacacucaggggaggcgggaaagcagguugugucugu

SEQ ID NO: 1714 - RNA, 89 nt, Homo sapiens
gggcucucccuuuccccucucuccuccaucuguaacccucucacucccagcuuacacucaggggaggcgggaaagcaggaugugucugu

SEQ ID NO: 1715 - RNA, 116 nt, Homo sapiens
gcgcccggcggcggcggcggcauggccaaggccagcgcggcugagcugaaggucuucaaguccggcagcguggacagccguguccccggcgggccgcccgccuccaaccugcgcaa

SEQ ID NO: 1716 - RNA, 135 nt, Homo sapiens
cgccgcgcuugccggagauagcauugagggcccuuccgcggcccggcguuucgucucuugggacgauuuugugcguucccucgguccccguggggcccauaguccucacuucugccaccccagagucgucgcgcu

SEQ ID NO: 1717 - RNA, 56 nt, Homo sapiens
uugugauggagucuugcucuuugcccaggcuggagugcaguggcuugaucucagcu

SEQ ID NO: 1718 - RNA, 53 nt, Homo sapiens
gcucgccugcaucuacucggcccucauucugcacgacgaugaggugacaguca

SEQ ID NO: 1719 - RNA, 130 nt, Homo sapiens
gcugggaaaucuccguuuugugguuucuccucaggcuaccucucuggguucuguuucuucccuguaaaauacuuuagcaacagaacccagagagucagccugaguggaaagcacugaaaugcccuggcuc

SEQ ID NO: 1720 - RNA, 59 nt, Homo sapiens
auuucauagagagcugauggguucauuuuacagagagcugcuuggucuguuuacaaucc

SEQ ID NO: 1721 - RNA, 88 nt, Homo sapiens
agccucucuuggcagggagggugugggcagccguuccagcuucagcgucuggagcuuguggcucuucugccugccgaggcagagcucu

SEQ ID NO: 1722 - RNA, 71 nt, Homo sapiens
gugcaguaaaggcaccagcauuuugcggcaccguaggugaggccggcggcgugggccuuuucucugcacgg

SEQ ID NO: 1723 - RNA, 78 nt, Homo sapiens
cgcagcuggggccagcggugccaagcgcagcuggacgagcggcagcagcugggcgagugacagccccggcuccgcgcg

SEQ ID NO: 1724 - RNA, 122 nt, Homo sapiens
ccgugccugcagacgcgcggaucguccaugcgcuccucgcgggcagaaugcugggcagcagcgucaagagcgugcagcccgagguggagcugagcagcggcggcggcgacgagggcgcggac

SEQ ID NO: 1725 - RNA, 109 nt, Homo sapiens
uccgcguguggaagguccguccgcguguggaagguccguccgcguguggaagguccgucaguguguggaagguccguccgcguguggaagguccguccgcguguggaac

SEQ ID NO: 1726 - RNA, 97 nt, Homo sapiens
ucugucagcguguggaaggucuguccgcguguggaagguccguccgcguguggaagguccguccgcguguggaagguccgucaguguguggaagguc

SEQ ID NO: 1727 - RNA, 108 nt, Homo sapiens
uggaaggucuguccgcguguggaagguccguccgcguguggaagguccguccgcguguggaagguccgucaguguguggaagguccguccgcguguggaagguccguc

SEQ ID NO: 1728 - RNA, 90 nt, Homo sapiens
ggguugguuccaagucuuugcuguugugaacaaugcugcaguaaacauacaugugcaugugucuuuauaguagaaugauuuauaacccuu

SEQ ID NO: 1729 - RNA, 110 nt, Homo sapiens
gguggggggugcucagcucugaccaugucuggaugcaguuggggugggggugcccagcucugaccaugucuggauacagucggcggggggcuuugcuuagcucugaccau

SEQ ID NO: 1730 - RNA, 108 nt, Homo sapiens
gucggggaggggugcucagcucugaccaugucuggaugcagucggggggugcccagcucugaccaugucuggauacagucgggcggggggggggcucagcucugacca

SEQ ID NO: 1731 - RNA, 122 nt, Homo sapiens
gugcucagcucugaccaugucuggaugcagucggggggugcccagcucugaccaugucuggauacagucgggggggggugcccagcucugaccaugucuggauacagucgggggggggugcc

SEQ ID NO: 1732 - RNA, 105 nt, Homo sapiens
gcugugggcggcuucuccgugggcuacuagcgggcccggcagcgaccagcuggucucggcuuccagcucgcggguucagggaaggugagucaugcgucccagcaa

SEQ ID NO: 1733 - RNA, 67 nt, Homo sapiens
ggcuucuccugaccuggggagucgcgcacuguuggacuugcucuuaaggcugggguuuugggguugu

SEQ ID NO: 1734 - RNA, 53 nt, Homo sapiens
cugccccugaggaugcucagaagaguucuucuccagcaccugcagacauagcu

SEQ ID NO: 1735 - RNA, 53 nt, Homo sapiens
gaguucuucuccagcaccugcagacauaucucagacaguaugggaagacuuga

SEQ ID NO: 1736 - RNA, 92 nt, Homo sapiens
gagcgcgacuuggccuuggcgcgggccuugccgccagucuugccgcggcccgacaugcuagcgagguagaccggugaagcacgacggcucaa

SEQ ID NO: 1737 - RNA, 62 nt, Homo sapiens
gggaacugaaggccagcgcgggacgagcgcgacuuggccuuggcgcgggccuugccuccuug

SEQ ID NO: 1738 - RNA, 95 nt, Homo sapiens
ugguaauucuauguuuaacuuucugaggaacugagaauaaguuuuaugccuuuaauccccucuuagacauuucagaaauugggagaagugccaag

SEQ ID NO: 1739 - RNA, 162 nt, Homo sapiens
guugaaaagcuaauucauauuguccaguuuaaaagaaaucauaagauguuucguguagaaagcaaaauaauuguaauuuuaguguuuauacuugcucuuuugcuaaaagaaaggucaguuugguggugauuauagaacuugguauagaauucuaauuaaacu

SEQ ID NO: 1740 - RNA, 129 nt, Homo sapiens
aauaaccuccuaccaauuuuaauucaguuuaaauuccuaauauucccaugagguagguaaaauggauuaucauuaucccauuauauaagugagggaacugagauuuuaagagguuaaaaggcuuguuua

SEQ ID NO: 1741 - RNA, 143 nt, Homo sapiens
ucucaguaguguuaaagagucugacacuagccuggccaccaccagcacucugggauuuggcugcaaauaagcaaaugcuccagggugaacaauguuuacagguugcaagguguagaaagauaguaaaugcugauucugagaac

SEQ ID NO: 1742 - RNA, 115 nt, Homo sapiens
ccgcacagaagauuggauuuucgucaagguuuacaacugugcccucuggagacggggaaauuaggaguuggaggaguaggggaugugagcauauguauucauaggcuguuuggcu

SEQ ID NO: 1743 - RNA, 81 nt, Homo sapiens
ugugaggaaaauaucgacgauuguccaggaaacaacugcaagaacgggggugccuguguggacggcgugaacaccuacaac

SEQ ID NO: 1744 - RNA, 113 nt, Homo sapiens
gaauuauacagguagagauguaugcagauguguccauauauguccauauuuacauuuugauagccauugauguaugcaucucuuggcuguacuauaagaacacauuaauucaa

SEQ ID NO: 1745 - RNA, 76 nt, Homo sapiens
auuaugcucaauauucccagaauaguuuucaauguauuaaugaagugauuaauuggcuccauauuuagacuaauaa

SEQ ID NO: 1746 - RNA, 84 nt, Homo sapiens
uuuguagagaggaaaggagguuugucaaaauaauuuuauaacaaugggcuauuuuaaaaaauccacuuaauuauacuucaagga

SEQ ID NO: 1747 - RNA, 110 nt, Homo sapiens
agaagcuagcaguuauacauacauucggagauugcauaguaguaauaagaauaauauucauuguuacuguucuuaaauugacauauuucuaguuggacugaaguuucucu

SEQ ID NO: 1748 - RNA, 73 nt, Homo sapiens
uccugcgcacuacagccuccggcagacacaggcagggcacaucgcgccggggugugcugcagcccgcggggac

SEQ ID NO: 1749 - RNA, 72 nt, Homo sapiens
uguucucuccugcuggugauggacuaggccuuuuagaacuagcaagaucccucacacagcugggagaacaca

SEQ ID NO: 1750 - RNA, 70 nt, Homo sapiens
agccuguguuaaggagcaaccuuucgguggccagauggagccggggcauccuucuucaaauaauggcuuu

SEQ ID NO: 1751 - RNA, 135 nt, Homo sapiens
gcuucccacagacagagaugugaguccccuccccagcuccacuugcuccugguauaaacguacauuaaugaagacugccagucaggcaggaauggggccagaccccuaucucaacaacccccacgugaaaagccu

SEQ ID NO: 1752 - RNA, 111 nt, Homo sapiens
ggcccugugagggaggcuggcaggcgcugcccgcugucacuccaugccggugcccuuugcuccacuucaguggccacgugaccaggccccauuccugcccucuaggguugu

SEQ ID NO: 1753 - RNA, 119 nt, Homo sapiens
guucggcucaagugaauugucugcaaauauuaaaaauucuaguuugggcuaagauuuauguguagcuuaacccaaacuagaguuguuaauacuuucagaaaauaaaaccuccccaaugu

SEQ ID NO: 1754 - RNA, 56 nt, Homo sapiens
agcccuccugggcugggcuugggcacaaauccccaggcaggcuuuggaguuguuuc

SEQ ID NO: 1755 - RNA, 54 nt, Homo sapiens
gggcuggucccaggcguggggcggcuucuugguccugaccuggcaccugcccca

SEQ ID NO: 1756 - RNA, 67 nt, Homo sapiens
ggauauuggucuaccugaggcuguuggucaaacuguacagguuucuggucagacggaacaacuccac

SEQ ID NO: 1757 - RNA, 66 nt, Homo sapiens
gugcucacuucuuccuggggacacucaucuguugaguacuccugccggggaagcuucagagugccc

SEQ ID NO: 1758 - RNA, 114 nt, Homo sapiens
gccacaaacuugccagucugcaacaaagcacagggcagcgagagaaggcggcauggcagcucagcugggaguuucaccgcugcccuguggaagagaauaguuggugugaggcaa

SEQ ID NO: 1759 - RNA, 78 nt, Homo sapiens
gggccugcggcacuugcgggccucccugcuggcuacugaugccaguaccagaggagccccaaaacuuugacagccucg

SEQ ID NO: 1760 - RNA, 102 nt, Homo sapiens
uaugcuggucauugaugauuuauuuacguaacaaaaaucugagguucaugcuucauguuuaaccucuuugcccugugucugucccccaaagcugugcaugca

SEQ ID NO: 1761 - RNA, 81 nt, Homo sapiens
uagcgcggggcuucuguacgcugcuaggaagccgaauuacaaaaaggucgggugggcagggaaugguggcucacgccuaua

SEQ ID NO: 1762 - RNA, 104 nt, Homo sapiens
ggacuccaucuguuuccccguuaugcccuccacgcguuccagguccuccaccuggcgggacaggaucgauaggggacagggucucggggguacccggucucccc

SEQ ID NO: 1763 - RNA, 72 nt, Homo sapiens
auggcuggagcugcagcugcugggaugcagggugccaugucccaaggcuuugcagagcccacaaaaccauuu

SEQ ID NO: 1764 - RNA, 59 nt, Homo sapiens
cacuccuccaccgcugagaguugaauagcuuuucuucugcaaugggaguugggagugau

SEQ ID NO: 1765 - RNA, 68 nt, Homo sapiens
gcuauugugucccaucugggucgccaaaauguguccaaaauugguuccuuccgguggguucuuggucu

SEQ ID NO: 1766 - RNA, 60 nt, Homo sapiens
aggcaaaugucccaucugggucgccaaaauguguccagaauugguggguucuuggucuca

SEQ ID NO: 1767 - RNA, 66 nt, Homo sapiens
ggcaauaggcgauugucccaucugggucgccaaaaugugucccaucugggucgccaaauguguccc

SEQ ID NO: 1768 - RNA, 76 nt, Homo sapiens
uuuguugccuuuucuuugcaguuagcuucuggaauuuauaauuuugccugcucucuguggaaucaccacacagaca

SEQ ID NO: 1769 - RNA, 61 nt, Homo sapiens
uuaaagaauaaacaugguguaucuuuguaucacccuguugcauucucucuccuuuuuaaaa

SEQ ID NO: 1770 - RNA, 94 nt, Homo sapiens
ugguuugaucaauuuuuuucaagcaaguaauuugauaauucuuuucagacagaaaaugucauaauguucuuguuacaaaauugaaagaaccaaa

SEQ ID NO: 1771 - RNA, 109 nt, Homo sapiens
ugugaaguucaauauuccugagagaguaauuucuaauguucuuguuacaaaaauguaaauguuugaagugaugauauauuaagcuaauuuaaucuuucugcauugcaau

SEQ ID NO: 1772 - RNA, 131 nt, Homo sapiens
auggacugcuccagcuccugaguucacugcuacucggccugagguugcagacuggucugaaggugugcaggugcccucugugccuauucagcaguucccuacugaagacuggagcgcucagccugccauag

SEQ ID NO: 1773 - RNA, 69 nt, Homo sapiens
gugugcaggugcccucugugccuauucagcaguucccuacugaagacuggagcgcucagccugccacgg

SEQ ID NO: 1774 - RNA, 72 nt, Homo sapiens
acggcgugcgggugcccucugugccuauucagcuguucccuacugaagacuggagcgcucagccugccgugg

SEQ ID NO: 1775 - RNA, 60 nt, Homo sapiens
caggugcccucugugccuauucagcaguucccuacugaagacuggagcgcucagccugcc

SEQ ID NO: 1776 - RNA, 69 nt, Homo sapiens
ugugcaggugcacucugugccuauucagcaguucccuacugaagacuggagcgcuuggccugccacaaa

SEQ ID NO: 1777 - RNA, 78 nt, Homo sapiens
ggucugcaggugcccucugugucuauucaguaguucccuacugaagacuggagcgcucagccugccacggaagacugg

SEQ ID NO: 1778 - RNA, 99 nt, Homo sapiens
gagcuuguugucaagguugcugaauagacgacugcauagugaagacacucccacugaguuuucguuuguuuguuugguuuuuuugagucggagucucgc

SEQ ID NO: 1779 - RNA, 134 nt, Homo sapiens
ggugggcugcacccuccugccuauucaggauguggaugccacaggagagcagcaggcaguggaaacuucaguugcacugguucuccugguggcaaaggcaugaagcacaggggucgauuaauccaggcuacuag

SEQ ID NO: 1780 - RNA, 142 nt, Homo sapiens
uuaaagaaaugauuaauuugguauuuuccuuucuaggaucaagcgugcuuuccuuaucgaggagcagaaaaucguugugaaaguguugaaggcacaagcacagagucagaaagcuaaauaaaaaaaugaaacuuuuuugagu

SEQ ID NO: 1781 - RNA, 60 nt, Homo sapiens
gucuaucgcugcgguugcgagcgcuguagggagccugugcugugccgcgcaguuaggcag

SEQ ID NO: 1782 - RNA, 76 nt, Homo sapiens
cuagaggagccuguucuaacccaauacaaagaugcggagaaacuugauaaaagguuagagggguugcuaacuagaa

SEQ ID NO: 1783 - RNA, 122 nt, Homo sapiens
cacuugugguaaauuguuacuuaagaaauaacuaaugcauaagcuauuugcggcauuccagcuucaaaaagauggugcuuguauuagauuugugguaaggaagauggagagaaaugagugga

SEQ ID NO: 1784 - RNA, 58 nt, Homo sapiens
ugcucuggggcggcauugccagccggcuguaggcauucagggcagugucuucugcauc

SEQ ID NO: 1785 - RNA, 76 nt, Homo sapiens
ggcccacugcugcugcucuccagccugcaguuuccucuaaggcucuggauuggcuggaagagcaacagagggcugg

SEQ ID NO: 1786 - RNA, 111 nt, Homo sapiens
uaauucuuuucaaaagaacuugaaguaaagcaauaagaacugagagagaaugguauuaguucuaucuuaguucuuguugcucuacuucaaguucuuuucaaaagaauuagu

SEQ ID NO: 1787 - RNA, 67 nt, Homo sapiens
cggggcggagaggaugcugggaauuguaguuuugaaguuuggauuggcauggcggccgugccccggu

SEQ ID NO: 1788 - RNA, 123 nt, Homo sapiens
gugucucaaaaaaaaaaaaaaaaaaaagaaagaaagaaaaagaaaagaaaagaaauauaagaauuuuucaugauuuagaacugaaaaauaaguuucuugucucucuguuucucaggaacacca

SEQ ID NO: 1789 - RNA, 57 nt, Homo sapiens
gcuggaaaaaacaacgaccugggcucucaguacggcugcuucuuuccaacaaggcac

SEQ ID NO: 1790 - RNA, 117 nt, Homo sapiens
agguuuuuaaaccuacugucucugucauaacuugucaacacugcuguaugaagcacaaaagcagccauagacaauacauaaacaauacgggcguggcuuuguuccaguaaaacuuug

SEQ ID NO: 1791 - RNA, 55 nt, Homo sapiens
guuaaaauguuugaaaaugguuuccuaucagaagccauacuuggggauggggcag

SEQ ID NO: 1792 - RNA, 75 nt, Homo sapiens
agaacaggguaauuuggauggagcaguguuucacagccugaaaugaugacucuuuaaaaaauuucaugucucuuc

SEQ ID NO: 1793 - RNA, 81 nt, Homo sapiens
acacccugaaaugaugacucuguugcucucagcuaggacuauggggagcaagaggaguguauuaguuuucuguggcuguca

SEQ ID NO: 1794 - RNA, 169 nt, Homo sapiens
gcgcggagaggcggggagggcgggcguggggaggcgggcggcggcgggcggggggagccaaggaggcucggagccucgcggcgcgcgggcgggcggcggagggggcgcggggagccccccgccccacgaaggaggagucuggcucccacuugcagccucggacgcgcgg

SEQ ID NO: 1795 - RNA, 71 nt, Homo sapiens
cuuugucaggaaggucaggaagcgcuucagucaauguggcuugagcugaaaugugauggcuggaaaagggg

SEQ ID NO: 1796 - RNA, 76 nt, Homo sapiens
uuucaaaaccuacugggggcaccauuucuucugcagaguaggcugggaaggaggagcuguccuggguucugaaaug

SEQ ID NO: 1797 - RNA, 62 nt, Homo sapiens
ccguauugcuauuuuugacuggagugagggucuucuuacucaaaggcaaauaggucccggcu

SEQ ID NO: 1798 - RNA, 94 nt, Homo sapiens
ugcuguaguuugcuggggguccacuccagucccuagucaccucagauuuuccaguaccuggagguaccaccaguaaagacuucaaaacagcaaa

SEQ ID NO: 1799 - RNA, 100 nt, Homo sapiens
auccgugcgucccuacagggagggcggucgcuaugaacgcacagcugggaggguggaguuggagcuggggacccucgacuggcagggaggacgcggaugc

SEQ ID NO: 1800 - RNA, 88 nt, Homo sapiens
aaaguaaguuaaaugacguggcagcagcagugaacaagacgcuguuagcuguuaagauaauuuacuuagccaagaacaaaagcuuuau

SEQ ID NO: 1801 - RNA, 118 nt, Homo sapiens
uuuuucaaccugauauuuuuucccuaacauaugcugacacaugccaaauuuaacccaguaauauaaaagcagucaaaagcaaauuuuggugaaguauuaaauauuaaauugagaagcc

SEQ ID NO: 1802 - RNA, 103 nt, Homo sapiens
ccugucucugugcaggugcuaugcucgccuucacccucgugcugucaacugccgcaagaagaaguguggucacaccaacaaccugcgucccaagaagaagguc

SEQ ID NO: 1803 - RNA, 56 nt, Homo sapiens
ucaacggccugcgcagggugcuggaugagcugacccuggccaggaccgaccuggag

SEQ ID NO: 1804 - RNA, 121 nt, Homo sapiens
ggcccugcagucgauccggaacaugcgcgggaacucccacuguguggacugcgagacccagaguaagugugugcggugguagcaggggcuggcgcuguguagcuggagaccacaugguccc

SEQ ID NO: 1805 - RNA, 58 nt, Homo sapiens
caacuugacaagacugcugcaaacuucaauuugucaaccacaacuugacaagguugcu

SEQ ID NO: 1806 - RNA, 68 nt, Homo sapiens
auuuauuuuuaauuuacccuguggaagauuuuauuagaauuaauuccaaggggaaaacuggugaaucu

SEQ ID NO: 1807 - RNA, 72 nt, Homo sapiens
uugagccuggauuuuguaauacuuuggauauuggaauauccuaauuuccaguuggaaaaauuaguaucaaau

SEQ ID NO: 1808 - RNA, 163 nt, Homo sapiens
gguaucauauuuuuuuccuuugcaguuuugguaagacucccccauuacuuugcuaagacuugcuuucucaaccagugggaugaaacgagugccaguguguugacugagccuucuuaggacuuaaggggcucugggagaggccaaggcagcaguugaaaacugc

SEQ ID NO: 1809 - RNA, 85 nt, Homo sapiens
ccuguagacuccggagggcagaggcuggaaccaucucauucacugcuugagcauuccuagcccucuuucuggcucacuauaggug

SEQ ID NO: 1810 - RNA, 77 nt, Homo sapiens
acuuugcacuucauagagaagguacauagagacauugcaaaaccugucuccauuugcuauccugauaauuaagguuu

SEQ ID NO: 1811 - RNA, 66 nt, Homo sapiens
auuacagagaggacuuuggccuagauaaggauaauaacugguuaaaggcccacaauucauuaauga

SEQ ID NO: 1812 - RNA, 59 nt, Homo sapiens
guucugaggaagguuuuccggggaugcauuagguucugagggaaguccucugugaaugc

SEQ ID NO: 1813 - RNA, 68 nt, Homo sapiens
gcauuagguccugagggaaguucucugggaacacauuagguucugagggaaguccucugagaaugcau

SEQ ID NO: 1814 - RNA, 67 nt, Homo sapiens
gccccucuucaugcugcaucugccccugugcuauuaggccaugagggcagagaccauguucuggcca

SEQ ID NO: 1815 - RNA, 65 nt, Homo sapiens
aacaccaaagauguagccucagaugugaaucuacucacaugcuggaaguuuguccaugauguuga

SEQ ID NO: 1816 - RNA, 105 nt, Homo sapiens
aguggucuuauuugggaagcaugcugauauugggguaggggaggcaacagagcucaugucuguaagccuugagcagaagaggugaugguagaaaagauagacuuu

SEQ ID NO: 1817 - RNA, 57 nt, Homo sapiens
uaaaaggcaagauauacauauguaugugacacacguauguauaucuugcccuuuacu

SEQ ID NO: 1818 - RNA, 101 nt, Homo sapiens
aacgauuuggggcacugaguuuccugggugauuucuuucuuucacaacauagauugaaacuauccacacaggcuuuccucauuuaaacaugaaaucguucc

SEQ ID NO: 1819 - RNA, 70 nt, Homo sapiens
ugacagccugccaggacucgcagugccuacagagcguggugcgugcccuccguaaccuggcagacucacc

SEQ ID NO: 1820 - RNA, 81 nt, Homo sapiens
cuagccaggacucgcuggccaucaucccaucuggucccaggaagcaugggcaggaggcccuugagacuucacucacuagcc

SEQ ID NO: 1821 - RNA, 90 nt, Homo sapiens
aagcuuuuugaugugcugcuggauucgguuugccagaauuuuauugaggauuguugcauugauguucaucaugcauggcccgaaguuuuc

SEQ ID NO: 1822 - RNA, 82 nt, Homo sapiens
gcaugccaaagauugccacguugcaagcacugguauuauuucugaaugugucuugcacccaguggauuuuauccuuguguca

SEQ ID NO: 1823 - RNA, 92 nt, Homo sapiens
aaagccccggcgaggcagggcuucuaagccucugagccucuucuuagcagagaccaagaugcuugagagccauuggcucuuggaggcuuucu

SEQ ID NO: 1824 - RNA, 80 nt, Homo sapiens
gccuuccaagagaaauccucucccagucacuuucgggccagcagagagucccgggagcacuugagagcuguugguggccu

SEQ ID NO: 1825 - RNA, 101 nt, Homo sapiens
ccuuggauggagagcuagaccugcuagagcaggacccucuggugccaccuccacccucacaggcaccccucucugcugagcggguggcuuuucccaagggc

SEQ ID NO: 1826 - RNA, 67 nt, Homo sapiens
cgcgauggggcugggcccuggccuccuaauggggcugccgucuggggcucucaccccugcccgcgac

SEQ ID NO: 1827 - RNA, 105 nt, Homo sapiens
ccgggaacgcguggggcggagcuuccggaggccccgcccugcugccgacccuguggagcggagggugaagccuccggaugccagucccucaucgcuggcccgguc

SEQ ID NO: 1828 - RNA, 105 nt, Homo sapiens
ccgggaacgcguggggcggagcuuccggaggccccgcucugcugccgacccuguggagcggagggugaagccuccggaugccagucccucaucgcuggccugguc

SEQ ID NO: 1829 - RNA, 61 nt, Homo sapiens
acugguaagaguuaaugcagggaaaucagcuaggggucgggcacugcagcagcucagguaa

SEQ ID NO: 1830 - RNA, 68 nt, Homo sapiens
ggccuaccggugacccggcuagccggccgugcuccugcuugagccgccugcuggggcccgcgggccug

SEQ ID NO: 1831 - RNA, 72 nt, Homo sapiens
gcugguaucagguuccggguucugucuggaggcuccgcuuccuaugcagagcuggcgguuuuguaucagcac

SEQ ID NO: 1832 - RNA, 168 nt, Homo sapiens
cagauaucucccucuuccauuucaucaagacccagcugagucacugucacugccuaccaaucucgaccggaccucgaccggcucgucuguguugccaaucgacucggcguggcgucggucgugguagauaggcggucaugcauacgaauuuucagcucuuguucuggu

SEQ ID NO: 1833 - RNA, 55 nt, Homo sapiens
ccucggagccgccucgcuccucuucagggacuuugcugagaagggcucucgggcg

SEQ ID NO: 1834 - RNA, 114 nt, Homo sapiens
ccuguguugccugccugcuguaucuuccaugucuuucuuauucaacuucuagaaguagagaagguugggacuugaguguagaagaaacaucagaauaauuucaaaaaacaggaa

SEQ ID NO: 1835 - RNA, 106 nt, Homo sapiens
ucgcaggcccccugcuggucguggggugggagacacucucuccucugcgccugcgcagggagcuccugcuuaauacgcuccgcggaagggucaagcacugucgaaa

SEQ ID NO: 1836 - RNA, 70 nt, Homo sapiens
gugucugccuggagaugcuggcuguuuuuuuaaucucuggaagcaccuuugaguguguucugccccaccc

SEQ ID NO: 1837 - RNA, 129 nt, Homo sapiens
ggccacgaugccgcaguaccagaccugggaggaguucagccgcgcugccgagaagcuuuaccucgcugacccuaugaaggcacgugugguucucaaauauaggcauucugaugggaacuuguguguuaa

SEQ ID NO: 1838 - RNA, 100 nt, Homo sapiens
ccugggaggaguucagccgcgcugccgagaagcuuuaccucgcugacccuaugaagguaaaucgcuggcggggccgcugcuuugggccccagcccaggau

SEQ ID NO: 1839 - RNA, 56 nt, Homo sapiens
cugucagccugagaacagggcuuguuugugucuuaaucccaggagccugcacggcc

SEQ ID NO: 1840 - RNA, 60 nt, Homo sapiens
ggggcuucaaccgggaguacuacucgauugucaaagucaaggagucgcaggucgccucgc

SEQ ID NO: 1841 - RNA, 62 nt, Homo sapiens
aguuuuuuuuuucgucugggcugccaacaugccauccagacugaggaagacccggaaacuua

SEQ ID NO: 1842 - RNA, 58 nt, Homo sapiens
gguaugcagaccucacagaagaucagcuacccuccugugagagucugaaggauacuau

SEQ ID NO: 1843 - RNA, 82 nt, Homo sapiens
gcuuaggaucgcagguaugcagaccucacagaagaucagcuacccuccugugagagucugaaggauacuauugccagagcuc

SEQ ID NO: 1844 - RNA, 63 nt, Homo sapiens
ggaaaauaaucugcucugaagucuugcauuucuguguguguaauacucuugcgggcgcuccac

SEQ ID NO: 1845 - RNA, 73 nt, Homo sapiens
caggcgugagccaccgcgcacggccuggagucucuucuguugccaggcuggagugcaguggcccaagcuuggc

SEQ ID NO: 1846 - RNA, 149 nt, Homo sapiens
ggugcauaaaugggggcagggucugaugucugaaugcuacuguuuaugccugucuucuugguuuauuuuggugcagaauguagccgugaguucaggcagugggcagaaugaucuggaaaagaugaccagcauccuggaagcugugccac

SEQ ID NO: 1847 - RNA, 77 nt, Homo sapiens
cuucuggacccuggcuucuccccacuguaacgccuguuacacacaaacuguuguggguuccugccaggcuugaagaa

SEQ ID NO: 1848 - RNA, 64 nt, Homo sapiens
agacauggauuccugaaguucaugaucagaaagcagaugugucagcuuggaaggaccuguuugu

SEQ ID NO: 1849 - RNA, 90 nt, Homo sapiens
ggcuucaaagcagagggcccugaaguggaugugaaccugcccaaggcugacguugaugucucaggccccaaaguggacguugaaggcccu

SEQ ID NO: 1850 - RNA, 90 nt, Homo sapiens
ggcuucaaagcagagggcccugaaguagacgucaacuugccuaaggcugacguugacaucucaggacccaagguggacauugaaggcccu

SEQ ID NO: 1851 - RNA, 86 nt, Homo sapiens
ugauaaaaagaagugguuauaucaaacuccucuacagaugugaaggaguggacaagaguugagcagccuuucugcugauuaucaca

SEQ ID NO: 1852 - RNA, 84 nt, Homo sapiens
agucaguguauuuggacgguaagguuaagcaaggugcgucguaucuugcuuaaccuugcccucgaaauacacugacuggauuuu

SEQ ID NO: 1853 - RNA, 66 nt, Homo sapiens
agcuuuuggcugguccgaugguaguggguuaucagaacucauuaacauuagugucacugaaguuga

SEQ ID NO: 1854 - RNA, 66 nt, Homo sapiens
aguuacuuuucaguuugcccaaauugagcccaucucaacauuuggcaguccuuaccaagcaacuac

SEQ ID NO: 1855 - RNA, 71 nt, Homo sapiens
aguucaaaaucaauggagugguuuuucauuccuuuuaauguaggaucaaguucauuuugauuugguacuca

SEQ ID NO: 1856 - RNA, 73 nt, Homo sapiens
uuccacaggccuggccuccaguugggacuccuccaucaucagagucugagccugugagaaccagcagggaaca

SEQ ID NO: 1857 - RNA, 65 nt, Homo sapiens
gccacguaguccucccacgaggcauacucagucaguguguccgugcgguaggggauccagggcau

SEQ ID NO: 1858 - RNA, 70 nt, Homo sapiens
gcgaagaccagaucauccuccugaaggggugcugcauggagaucaugucccugcgggcggcuguccgcua

SEQ ID NO: 1859 - RNA, 99 nt, Homo sapiens
gccugugugcaagguccaggaucaguugcucuuccuuugcagguacugacagacccagaagcagcuaaauauguucauggcauugcuguacauugguac

SEQ ID NO: 1860 - RNA, 59 nt, Homo sapiens
uauuguuuugcuagguguucauccuauaagaagcaggauuguauaggcagaaaaaugau

SEQ ID NO: 1861 - RNA, 86 nt, Homo sapiens
cuucguucuuuuuuacaaggcugaguaauauuucauugguuguauauaacauauuuugcuuucuguuuacaaauauuuauggagug

SEQ ID NO: 1862 - RNA, 113 nt, Homo sapiens
aagugaggagggcagccagcagcuuccccuucucugcccugcuccaggcaccaggcucuuuccccuucagugucucagaggaggggacggcagcaccauggacccccgcuugu

SEQ ID NO: 1863 - RNA, 115 nt, Homo sapiens
ugcuacauuaccgcugccauguaagaaagacagucagcaaagccugggagagcuccagcuccucccucccugcucugcucaacuucacucuccuccucgguucccuuggaguacc

SEQ ID NO: 1864 - RNA, 119 nt, Homo sapiens
uggggcaggaaguaggggugggguuggagcugcagcagaagugggcagggccagauggcaaggaaacaaaugguccacugaggcuggggccaggagccuucuuccuugaacaauccagc

SEQ ID NO: 1865 - RNA, 100 nt, Homo sapiens
gguggcagaugccuguaaucccagcugcuuggaagucugaggaagggagaaucacuugaacccaggaggcggggguugcagugagccauagcgccacugc

SEQ ID NO: 1866 - RNA, 54 nt, Homo sapiens
uuacccgagugugguggugggcgccuguggucccagcugcuuggaagucugagg

SEQ ID NO: 1867 - RNA, 75 nt, Homo sapiens
agucaaggugaugugauguggcugagcagggaggccaucuuccuuccagacagagacucugucacuuuggacugg

SEQ ID NO: 1868 - RNA, 82 nt, Homo sapiens
ggcucgcuccuccggcggcggcggcggcggcgacucugcaggcggaguuucgcggcggcggcaccaggguuacgccagcccc

SEQ ID NO: 1869 - RNA, 52 nt, Homo sapiens
gaucguucugucauaaagacacaugcacacguguucauugcagcacuguuca

SEQ ID NO: 1870 - RNA, 52 nt, Homo sapiens
uucuuccagcgauuuugaaauaccuuuauuuauuuguuuuugagacaggguc

SEQ ID NO: 1871 - RNA, 85 nt, Homo sapiens
ggcaugcaggcuuugccuggcugcuaucucuagaggcaagucugccacgagagggcacugcaggcgaagcaguugugcuugcuca

SEQ ID NO: 1872 - RNA, 67 nt, Homo sapiens
gucugucugccuccugacacuguccaugccgcccaggcugcuagcccccaggggcaccugcaggcca

SEQ ID NO: 1873 - RNA, 54 nt, Homo sapiens
aaccggucacugguggguccuggcacuggcgggucgcaacgcugugggcguucc

SEQ ID NO: 1874 - RNA, 83 nt, Homo sapiens
ggccuggugaagucugcuacucuguccuuacugcugaacauccugcuuguaucaggaaacucagaagcaguuugccuugucaa

SEQ ID NO: 1875 - RNA, 94 nt, Homo sapiens
ggcggcucggaagagcgcuccggccaccggcggugucaagaagccccaucgcuaucggccugguacaguggcucuccgcgagauucgccgcuac

SEQ ID NO: 1876 - RNA, 94 nt, Homo sapiens
gggcagccaggagucgggcgagccucgggggcugcagaauggggucgcggccgcgaugccccugacccucgccggccccacccaggccgccccc

SEQ ID NO: 1877 - RNA, 62 nt, Homo sapiens
gucuccaggggcagucugccacccauccuuccugacugccuggcccuguccccugcagaccg

SEQ ID NO: 1878 - RNA, 110 nt, Homo sapiens
ggccagcuccgggaugacccgccgggacccgcucgcaaauaagguggcccugguaacggccuccaccgacgggugagugcuccggccggaguuucugaggcccuggcugc

SEQ ID NO: 1879 - RNA, 111 nt, Homo sapiens
uguguccuguuccgcuucuccgaggacgccuucaacuccacuuuuaucuccaccauagguaacgggaccggggaauggcugggggcgccggaggcccgggcugggcgcgcc

SEQ ID NO: 1880 - RNA, 85 nt, Homo sapiens
ugaagggaaccccacuucggagccuggagcacagggcgagcucuccuccgcccugcagccucagguaaggauccggaccuucacu

SEQ ID NO: 1881 - RNA, 89 nt, Homo sapiens
ggacgcuguggcgagaagccgggcuuagcuggaaggaauuucuaccugaaggccaggacauuggugcauucgucgcugaacagguuugg

SEQ ID NO: 1882 - RNA, 61 nt, Homo sapiens
ugugguuaaagacugaauuuguaaacccauucagauaaauggcaguacuuuaggacacaca

SEQ ID NO: 1883 - RNA, 144 nt, Homo sapiens
cuuuuaacccgcaacuacugaaaauaagagucagcauguagcagcauuaaugaccccugaauuugaaaugauuucuguuuauuuauaccuaauuguaguugcugccuagccuaauaaaucuguaguuuucaaaaguuaaaagaa

SEQ ID NO: 1884 - RNA, 73 nt, Homo sapiens
cgcgagggucggggguggggguccuagguggggacagacaauaaauaccgaggaaugucggggucucagugca

SEQ ID NO: 1885 - RNA, 57 nt, Homo sapiens
auaaacuaauagguuuucagaauuaugaauuuuucagaacucauccaguccuuguaa

SEQ ID NO: 1886 - RNA, 82 nt, Homo sapiens
cucuucugccaucccuugucucccugaggccaucaucaaacaggacagaguuggaagaggagacugggaggcagcaagaggg

SEQ ID NO: 1887 - RNA, 136 nt, Homo sapiens
ggcaggacgacuguucagcacgcagaccgccgaggacaaggaggaaccccugcacucgauuaucagcagcacagagagcgugcaggguagccuuggcucgugcuuuggucugggagggcuuuuugguucacugcug

SEQ ID NO: 1888 - RNA, 77 nt, Homo sapiens
ggugacggggggagagcgaggguuccgccggccaccgcggugguggccgagcgcggcucgucgccuacuguggccgg

SEQ ID NO: 1889 - RNA, 83 nt, Homo sapiens
gcgaugcgcacggcucccaggcaggcaggcgcgcucgggcgagguaggagcgauguggccugggaacgccuggcgcgccgcac

SEQ ID NO: 1890 - RNA, 82 nt, Homo sapiens
uccgcuacguauucccguauucccgggugccuggcaacagugaugugcuuuaggccuuuuuuagaaugcauacaaacggaac

SEQ ID NO: 1891 - RNA, 58 nt, Homo sapiens
gcggcccucggugccuccuuccugaccucgcacccagcucggagcccggagcgugccu

SEQ ID NO: 1892 - RNA, 58 nt, Homo sapiens
uguuuccuuuaaggagggugcaaaguuguucuaacaguuuccguuacaaggguacaaa

SEQ ID NO: 1893 - RNA, 58 nt, Homo sapiens
uggggaaagccgagagccacaggccuucuucugaggcauguggcuuuggugacucagg

SEQ ID NO: 1894 - RNA, 100 nt, Homo sapiens
uucucuguagaguuuccucuagagagauuuugaccauaauaaccagcuggcccucagcuucccauuuccaucuccuagugcacuaaccuacugaugaaau

SEQ ID NO: 1895 - RNA, 95 nt, Homo sapiens
cacuugugccaggccuugugcugggcaccguaggggcuauggaaggaguaagacacagucaugcucucaaggaacucgcuguccagcagagugau

SEQ ID NO: 1896 - RNA, 115 nt, Homo sapiens
guuuccccgcaugguuccggaagagcgcggcgcagcuggcugugagcgcagggcuaucccggcggccgcuucggcagccagggcggcgcggaggggcagggccagagggaagcgc

SEQ ID NO: 1897 - RNA, 61 nt, Homo sapiens
aggguuccgguggugcccuggcggccaucgcuggaggccgcgguugcuaugggagaccugg

SEQ ID NO: 1898 - RNA, 69 nt, Homo sapiens
cuuccuuauuuccuaaaguaccuggcaaagaauucugcaacuuuguuuaguaccagcaauuaucaagug

SEQ ID NO: 1899 - RNA, 105 nt, Homo sapiens
gacuggugaaugugcaauguuaguaauuagaaguuuuaccacauggaaaauuugugguuuuaaacuuucuaaaucauggugacuucauugaaagccauuaguugc

SEQ ID NO: 1900 - RNA, 67 nt, Homo sapiens
uuucgcugagcggcacggcuacaucaagggcaucgucaaggugcggaacgcuggccggggcgggagg

SEQ ID NO: 1901 - RNA, 76 nt, Homo sapiens
acucucuauuggcucaaacagguugaccucaauccaaguuuacucuugauaucacucuguuggcugaaggagguaa

SEQ ID NO: 1902 - RNA, 64 nt, Homo sapiens
uggugaagccacagguguucuguauuucagcuccgggaguucaacaucugugggcgcugccagg

SEQ ID NO: 1903 - RNA, 116 nt, Homo sapiens
aacagcuuaaugucucauguuggaaagaguaaaggaaaugucacugucuuauccucuugguaggaguaugacuugguauaaucuuuccacagagcaacaucuauuugagaaguuaa

SEQ ID NO: 1904 - RNA, 121 nt, Homo sapiens
gccuucuuuuuauagaguuggaccagaaaagcuuaaugcagcagagucaugcagugaaggcagauucaugggcuugcauccuggcuucaggucuuacuagaugugugaaaaaauuaggccc

SEQ ID NO: 1905 - RNA, 76 nt, Homo sapiens
agugaagggcccgacgcaauaacuucuggauaaagccuaaguccucccuuuuguuaucgggagauuucuucauuca

SEQ ID NO: 1906 - RNA, 70 nt, Homo sapiens
uucacggugcggcugcuucacaucuucacggucaacaaacagcuggggcccaagaucgucaucgugagca

SEQ ID NO: 1907 - RNA, 93 nt, Homo sapiens
cuuuccaggaggcuggauggcuuccagggucacuccuugcccuggguggcucccaggcuccuggaacuucugccuccaccucgcuggggagcc

SEQ ID NO: 1908 - RNA, 72 nt, Homo sapiens
uguaaccuucugugccggggaggauauuugcauuuaagcagaaaguguuucaggcucugcagaggugacacu

SEQ ID NO: 1909 - RNA, 79 nt, Homo sapiens
auggaagauuucgaucaguuaggguacaagcuaaauaguuauguucuuguuguuugaguuggauuagguguuuuuaucg

SEQ ID NO: 1910 - RNA, 79 nt, Homo sapiens
uggcaaguccgacugacacucgagggguuucccuuuagcugccacccucaaucccagaagugacagugauucuguuacc

SEQ ID NO: 1911 - RNA, 67 nt, Homo sapiens
ggccccuuugacgucuugagugggaaaucacaagauacugcuccagauuuucccauuuuauggcuaa

SEQ ID NO: 1912 - RNA, 52 nt, Homo sapiens
agauaaaacugugaaaaugaugacccacuaugcuuacaguuuacacauuuac

SEQ ID NO: 1913 - RNA, 54 nt, Homo sapiens
uaagaaaaaguuugccugcuuuugagcuagaaaauaaacuuuaugaauuuuaua

SEQ ID NO: 1914 - RNA, 66 nt, Homo sapiens
uccccauuccuuggcagauugggggcacugaggaauauaagauuugccggggcaucaaggagggcc

SEQ ID NO: 1915 - RNA, 100 nt, Homo sapiens
cgcugcuccagcuugacacagcgguuuagugcgguagaaacgaccgggggacugguugggcucuugaccaucagacagcugcgugugagauggaagugcc

SEQ ID NO: 1916 - RNA, 76 nt, Homo sapiens
gcccgcgcgccgccccauauaaaggcgccgccguccuuacccccaggacucggccccauggagacgccgccggccg

SEQ ID NO: 1917 - RNA, 73 nt, Homo sapiens
aaaccauuaucaagugaucuaguugucuucaaccauacaaaagaaaauugacaugauuucaggauagguuuag

SEQ ID NO: 1918 - RNA, 141 nt, Homo sapiens
ucgcucuugcugguguagacacggucagcuagacucucaauggcaauccacuugacuggcaucuuggcgauacgucccuggcgguaguaguccccauuguagaucuucuuggagagcccgaaguccgccacacacacggac

SEQ ID NO: 1919 - RNA, 83 nt, Homo sapiens
gggucccgcagcgggacccgagccucggcggcggcggcggcggcggcaggggcgagggucggggccaccgcgcggcgaccucg

SEQ ID NO: 1920 - RNA, 67 nt, Homo sapiens
aguaucccccgcgcgcccaacucggagcgcccugcugggcgggcccgagccucggcggcggcgcuga

SEQ ID NO: 1921 - RNA, 117 nt, Homo sapiens
gccccgaccugggggugggcggugggcgggcggcggccgcucuggcgcggcugggaugcaccuugagcggcgccuuucguugcagcgcgcgggcggcccgagccucggcggcggcgg

SEQ ID NO: 1922 - RNA, 127 nt, Homo sapiens
uccucauugguuugugcugaaauaugagugcaauuuccuguccccucagcaguguugguuucucuucuugacuugaugcaggcacagauuuaucaagcuccucagucaacaaacacaucaccggaag

SEQ ID NO: 1923 - RNA, 70 nt, Homo sapiens
cagccugggacagaccugcgugcugaucgugaucuucacagugcuccugcagucucucuguguggcugua

SEQ ID NO: 1924 - RNA, 114 nt, Homo sapiens
gggucuauuguugucaagaaggaaaaaauaaagagaaagguuagauaugaauauaaggcugauauuucuaauuuuuuuuuaaaaggagaccucugugugauaggaaaagcuuag

SEQ ID NO: 1925 - RNA, 63 nt, Homo sapiens
cgauugucaugacuccuguguugcagacagaugcaaggagauggaagaaggguaaaggucgaa

SEQ ID NO: 1926 - RNA, 67 nt, Homo sapiens
agugucuauuucuuugcugcggagaacaaauuccuaaauaguuuuaguaaaggagcugagaagcuag

SEQ ID NO: 1927 - RNA, 60 nt, Homo sapiens
uguagguuucuaaugauacaaguggcagagauaccuuuauuuggaauugguagcaauagg

SEQ ID NO: 1928 - RNA, 54 nt, Homo sapiens
acuggcuuccgcagccacagcagccgcccugggcagcggcagcggccgcagugg

SEQ ID NO: 1929 - RNA, 65 nt, Homo sapiens
uucugauauaauccacuucucuuuccuuauaaaguguuauuaugaaagagagaaaauugagaggc

SEQ ID NO: 1930 - RNA, 103 nt, Homo sapiens
cucuucauaaaaagcugcuauuuuauuuguucauuugauuaacagcugaguauuauacuuucuaagcaaaugaaagagagaaaauuuagggguggcuugggcu

SEQ ID NO: 1931 - RNA, 99 nt, Homo sapiens
uaaucccuggugcaacaauuugugagguggggcccaaugggaaguauuuaggucaugagagcuccacugucaggaauggauggauuaauguggauuauc

SEQ ID NO: 1932 - RNA, 159 nt, Homo sapiens
aaugcaaugguauuaagagguauggccuauaggaggugauugaguuaugagagcuccacugucaugaaugggauuaggugcccuuauaaaaaggcaugacagagggaguucauuccuuuuacccucugucccuucugccaugugaagacauagcauucc

SEQ ID NO: 1933 - RNA, 119 nt, Homo sapiens
uaccuaacacugcugaacuguauacuucaaaaugguuaagaugguaaguuucacguuaguguauuuuaccacaauuuuaaaaauuggugcugcuuuucauguauuuaaauauggguaaa

SEQ ID NO: 1934 - RNA, 83 nt, Homo sapiens
agccgaaguugaaauguuuguguugcuaaaaucuucucuuagucagacuucauugaacaagccaaacaauuaacuuuuguuug

SEQ ID NO: 1935 - RNA, 140 nt, Homo sapiens
ugcucuuuuuaaaaaucuccuuccuaugaucuagggcgaaaagcgaaugagaaggagcggcaggcagcccugcagguggccgagggcuucaucucgcgcaugcaguacgccccgaacacucaggugaggagaugcgcaca

SEQ ID NO: 1936 - RNA, 82 nt, Homo sapiens
gcuugcuaagacauagggaaauuugugguuaaaauuuccugagggaaaugaucacugauuucaguuuuggauuuuauggucu

SEQ ID NO: 1937 - RNA, 99 nt, Homo sapiens
ugacuucauaccacauugucagccaccccccaccccacccccaggcuaggcuggggauuucugagggggugacagcauugcugaguacggaaugucagc

SEQ ID NO: 1938 - RNA, 93 nt, Homo sapiens
auccaggcacaggccuuuccuugccuuccugggccuuccuggggcuucaggagcugggccguggagugggggagaggcugucagccuggaucc

SEQ ID NO: 1939 - RNA, 54 nt, Homo sapiens
uuuaacuuguggcuccuuuugccucccaagcagaaugagguaguagauuagagc

SEQ ID NO: 1940 - RNA, 79 nt, Homo sapiens
cuggcccaucuuccuauucccacguguagcuagugucuagugucagcuuugcucagugugguggaaacauuuugcagaa

SEQ ID NO: 1941 - RNA, 66 nt, Homo sapiens
gucauaaugccgucuuuauauucuuaauaaauagcacuuugacaagaacaggacuguaaaugauga

SEQ ID NO: 1942 - RNA, 55 nt, Homo sapiens
guuaagaguaggccagucaucuuugucccucaguggcggcuuuuccaccaggcug

SEQ ID NO: 1943 - RNA, 88 nt, Homo sapiens
acaucaaaaucuuuugugucauuuaucagauuaauuacuuuuuccauaaaaagagugaguugagaggauaacaagaaacucccugucc

SEQ ID NO: 1944 - RNA, 100 nt, Homo sapiens
uucuuggaaucaccaccuuaaacaucaaaaucuuuugggucauuuaucagauuaauuacuuuuuccauaaaaagagugaguugagaggauaacaagaaac

SEQ ID NO: 1945 - RNA, 73 nt, Homo sapiens
uauuugacccaagauuucuuuaaugaaguaaccauuccaguguaaauguaaaagauguaucuucucaaauaug

SEQ ID NO: 1946 - RNA, 69 nt, Homo sapiens
gguaggaaaaucuugggauuccuggagugacagcgaagaagaauuuuuugaaugccuaagugauacuga

SEQ ID NO: 1947 - RNA, 129 nt, Homo sapiens
uguugauaaaagauuguguuugccauucucauuuauaaugcaguuucuccuuaagccuggaguuuuuugaaugagugcaugaguaaaugagagaaugugugaacgaacauuuaugaaguaucuaacaug

SEQ ID NO: 1948 - RNA, 79 nt, Homo sapiens
aucuggacacucugaauguuuuuguuaucaguguuuauuaauuuuacagaacagaggacaacgcaacaaggccaggugu

SEQ ID NO: 1949 - RNA, 71 nt, Homo sapiens
ggagccuggccucuguuuuugucucuguguguuguguguacacacugaacguggacaucggauaguucuuu

SEQ ID NO: 1950 - RNA, 119 nt, Homo sapiens
cucacggacuucucgcccaacucccugagcgcucccucguuucgaucuuuagaaaaccccgcuuucuuucuggggccgugacgaggggcagggagcggcgagcaaggaugcguugagga

SEQ ID NO: 1951 - RNA, 57 nt, Homo sapiens
uugaaguuaaugucagcuugcccagguucaaacuggaagagaguuacacucucaacu

SEQ ID NO: 1952 - RNA, 96 nt, Homo sapiens
caaaaaaaaaaaaaaaaagaaucuuaaccuaauaaaaacucugccuuacaucuguguuucuuuugggccagauuuuugugaucauauauguuugag

SEQ ID NO: 1953 - RNA, 172 nt, Homo sapiens
uuauuacaacuugcauguauuuugucuguuuacucauuauuucgucugucucaccguuccaagguaagcaccgugaaaacggacugugucuuuuuaguucuuuacuguguuucugccaucaagcccaguguugacacaugguagguacucaagacaugcuggcugaaugaau

SEQ ID NO: 1954 - RNA, 69 nt, Homo sapiens
gcaagccugcaggacagccaguguggaggggcuaccggaagcuucaugugggguacacugcguuuguau

SEQ ID NO: 1955 - RNA, 90 nt, Homo sapiens
acagucucacaagcaaugauucuggugaguuuagaaaugaaucaggaugugcuaagcucaaugaggacucauuagccuuggauaauguga

SEQ ID NO: 1956 - RNA, 87 nt, Homo sapiens
ccagauaauauaagcaaggaaaacuguguuuucagaagcucacugauuggcauaguuugugguguuuucuaucccaguucuuuggcu

SEQ ID NO: 1957 - RNA, 84 nt, Homo sapiens
uccgcaugucccuucgcgggaaggcuguggugcugaugggcaagaacaccaugaugcgcaaggccauccgagggcaccuggaaa

SEQ ID NO: 1958 - RNA, 84 nt, Homo sapiens
uccgcaugucccuucgcgggaaggucguggugcugaugggcaagaacaccaugaugcgcaaggccauccgagggcaccuggaaa

SEQ ID NO: 1959 - RNA, 103 nt, Homo sapiens
ucucaacggcucugggcggaugacuugcaggguggcuucccccgaaacacugggguggaggcugaggcucccagcaagggugagcccuggugucggggaggaa

SEQ ID NO: 1960 - RNA, 64 nt, Homo sapiens
gccuccuggacccggcauacccccagcuuacucaagucccaggcgggagcgucuucguuggccc

SEQ ID NO: 1961 - RNA, 82 nt, Homo sapiens
aucugggcgaucgcuuccugguccucgccuccuccgcugucucccuggaguucuugcaagucggccaggaugucucagguac

SEQ ID NO: 1962 - RNA, 66 nt, Homo sapiens
uggcugccauggcuguacuacggguguguccaagaaggaauaagucuguaggccuugucuguuaau

SEQ ID NO: 1963 - RNA, 76 nt, Homo sapiens
acuggcgggagugucuuuagcauguuagcgcauuauauaauuaguguauaaugagcagugagacgacuggagguca

SEQ ID NO: 1964 - RNA, 120 nt, Homo sapiens
aaguuauuuuaaugucagauuuuugaauguuauuauauauuaccuguaugauggaaggauuaccacuguacacaaaucuaaucaauaaaaacguuagaaccuucugcuuagaguacuuuu

SEQ ID NO: 1965 - RNA, 107 nt, Homo sapiens
cauacaguguaccuauuuaauguguacagugaagugguuuuuaguauauucacagauauaugccaccaucauucucucacuuccuuauuuuagcugugcugaaugaa

SEQ ID NO: 1966 - RNA, 61 nt, Homo sapiens
gggcuacccaggggcuuccuauccuggggccuaccccgggcaggcacccccaggggcuuau

SEQ ID NO: 1967 - RNA, 102 nt, Homo sapiens
gcuguaccccgagcguggccacgggcugcacgcagacaagggcgcuggcgucaagguggagucggagcugcugugcacccgccugcugcugggcggcggcuc

SEQ ID NO: 1968 - RNA, 52 nt, Homo sapiens
gcaccaguguggagggcggucccacccaccuccuccacuucucccuuugcau

SEQ ID NO: 1969 - RNA, 85 nt, Homo sapiens
uauucauugucuaccugagcuagaauacaaguaguuggcgucuucagagacacuuguaugcuagcucagguagauauugaaugaa

SEQ ID NO: 1970 - RNA, 88 nt, Homo sapiens
cauggacgagaaccuguucgugugcuccgacugcgggaaggccuuccuggaagcccacgagcuggagcagcaccgggugauccaugag

SEQ ID NO: 1971 - RNA, 84 nt, Homo sapiens
gccgcgaguuccccacgcaccgcucggugcuggccgccugcagccaguacuucaagaagcuguucacgucgggcgccguggugg

SEQ ID NO: 1972 - RNA, 62 nt, Homo sapiens
gagccaccagguuuguguaauucgcuacuacggcagucacaggaacucaggcaccauuucuc

SEQ ID NO: 1973 - RNA, 90 nt, Homo sapiens
ggcgcacuacggggacgcugggccgggcaccgggcuguguggagaagugagcgcgcucgucugacccccgugcccgccaccccgagccac

SEQ ID NO: 1974 - RNA, 134 nt, Homo sapiens
agaagucccucuaccuggcaaugggcccuccaccgagaacuccuggugcugagauggacggaucaugauuuccuucugucugcaccaggcuuugcuuaggagagaaaaugccagaaacaaaaaggcuuuucuca

SEQ ID NO: 1975 - RNA, 104 nt, Homo sapiens
cgcuguggccacgcugguuccucaauugcuggggcgugcagugucuguaagggaggcuacugaugccauccgaggaagauguaagguuucgugugggcagcgag

SEQ ID NO: 1976 - RNA, 101 nt, Homo sapiens
uagcucacugcagucuugaacuugcuggcucaagugauccucccacuucagccccccaaggagcuaggacuacaggcacacaccaccacaaccuggcuaau

SEQ ID NO: 1977 - RNA, 55 nt, Homo sapiens
uuuaauaggaaugccauuacuagagaauuacuuuccugagcaaaucugaugaaua

SEQ ID NO: 1978 - RNA, 56 nt, Homo sapiens
uuaaguuguugcuuggaagugagaaguugcuuagaaacuuuccaaagugcuuagaa

SEQ ID NO: 1979 - RNA, 56 nt, Homo sapiens
aguucccaguucccaccugcugagaguucagaacucagaccguaggugugggcuua

SEQ ID NO: 1980 - RNA, 63 nt, Homo sapiens
guuucagacagggucugaaggacuggauuggccaaacaucagaccugucuuccaaggagacca

SEQ ID NO: 1981 - RNA, 94 nt, Homo sapiens
gucguggugcacaccuguagucccagcuacuggggaagcugaggugggaggauuauuugaguccaggagauggaggcugcagugagccugauca

SEQ ID NO: 1982 - RNA, 68 nt, Homo sapiens
accgugacagcaauggauguggucuacgcgcugaagcgacagggacgcacucuuuacggcuucggugg

SEQ ID NO: 1983 - RNA, 58 nt, Homo sapiens
ccucccagguucaagcgauucucaugccucagccccagaguagcugggauuacaggca

SEQ ID NO: 1984 - RNA, 73 nt, Homo sapiens
ugugaucugcagcuggaccuccuggguucaagugguccucccuccucagccccagaguagcugggauuacagu

SEQ ID NO: 1985 - RNA, 123 nt, Homo sapiens
gugcaugcacacacacacacacacacacaaucuugcacacaaccucagagguaggucuaucaauuaacagauucugguuaagagccccugccuuagagcucugguagguucucagcagcaucu

SEQ ID NO: 1986 - RNA, 54 nt, Homo sapiens
uuggagcggaagcgcacgccugcuaggaucagcgguggugguuccgcgauggua

SEQ ID NO: 1987 - RNA, 97 nt, Homo sapiens
gccuggaguggauguaggaacagccugcuggcucagaagcuuaaaaaaagcucuguguguuuucaguuuuucucuucuuaguucucaaugaagguuu

SEQ ID NO: 1988 - RNA, 73 nt, Homo sapiens
cccacccagaguaacacacauuuaugacuuuuucuccaggaguuagcugugccagugguucaugacgggggcg

SEQ ID NO: 1989 - RNA, 60 nt, Homo sapiens
gugaaccaugccccagugagcccccggccaggccuggggcugccuccuggggccccaccc

SEQ ID NO: 1990 - RNA, 81 nt, Homo sapiens
gcugucauuaguaauggggaacauuaagauacucugugaggugcaagacuucaggguggggugggcaugggguggggguau

SEQ ID NO: 1991 - RNA, 79 nt, Homo sapiens
guccucggucgguacagucucugcaccucgcgccccagcaggugagcggcgaccgguaacuggcgagugguggggauag

SEQ ID NO: 1992 - RNA, 76 nt, Homo sapiens
ucugggagaacuuuaucuuaaccuggagaucaagggaacaaauggacagguuacaagagcagauauucuucagguu

SEQ ID NO: 1993 - RNA, 57 nt, Homo sapiens
uuuagugacauucaucugcuggcuaugauguacaguggagaaauguguuacugggga

SEQ ID NO: 1994 - RNA, 83 nt, Homo sapiens
gaagcuagaagaaagaggauuacuugaggccaggaguucaaggccagccuggccaacauagugagccccugucucuguuuuau

SEQ ID NO: 1995 - RNA, 68 nt, Homo sapiens
gcuucaacagugcuuggacggaacccggcgcucgucccgcacccgggccggccguccauagccagccc

SEQ ID NO: 1996 - RNA, 71 nt, Homo sapiens
gacguucuucgccgagagucgucgggguuuccugcuucaacagugcuuggacggaacccggcgcucguucc

SEQ ID NO: 1997 - RNA, 71 nt, Homo sapiens
gacguuccucgccgggagucgucgggguuuccugcuucaacagugcuuggacggaacccggcguucguccc

SEQ ID NO: 1998 - RNA, 65 nt, Homo sapiens
ggccuccccagaagcugagcagaugccagugccaugcuuauacggccugcagaaucgugagccaa

SEQ ID NO: 1999 - RNA, 84 nt, Homo sapiens
aguaucccauuuuacuuuuuacuucuaugagaucaacuuuuuuuagcuaucacauaugagugagaacaugugguguuuaacuuu

SEQ ID NO: 2000 - RNA, 132 nt, Homo sapiens
agcugacagaugaagaaagaaaccuccuaucuguugcauaugagaaugugauuggagcuagaagaaccuccuggagaauaaucagcagcauugaacagaaagaagaaaacaagggaggagaaaacaagcuag

SEQ ID NO: 2001 - RNA, 86 nt, Homo sapiens
agcaugagugcuucugcugauguguuggcccuggcgaaaaucgaaaucaaguuauccgauauuccagaaggcaagaacauggcuuu

SEQ ID NO: 2002 - RNA, 64 nt, Homo sapiens
uuuggguuuuuucuuagcucacgugucagacggcacugcauguccugcaguuaacacucaagga

SEQ ID NO: 2003 - RNA, 79 nt, Homo sapiens
auuuucaagacuaugauacaacuccauuucaagcaaaaacccaaugaacagcuuauguguuagccauagcugaaaauaa

SEQ ID NO: 2004 - RNA, 79 nt, Homo sapiens
gggauuagaggcgugagccgccgcgccgggccuccccccuuccccuccgccgccgccuucucaucgcccuuccuccuuc

SEQ ID NO: 2005 - RNA, 80 nt, Homo sapiens
aggagcucuuguaaggcaggccugguggugauaaaaucucuuagcauuugcuugucuguaacggauuuuauuucuccuuu

SEQ ID NO: 2006 - RNA, 80 nt, Homo sapiens
aggagcucuuguaaggcaggccugguggugaugaaaucucucagcauuugcuugucuguaacggauuuuauuucuccuuc

SEQ ID NO: 2007 - RNA, 80 nt, Homo sapiens
aggagcucuuuuaaggcaggccugguggugacaaaaucccucagcauuugcuugucuguaacggauuuuauuucuccuuc

SEQ ID NO: 2008 - RNA, 154 nt, Homo sapiens
ccgguuguucuuuuccauguuuagugcuuccuucaggagcucuuguaaggcaggccugguugugacaaaaucugucaccauuugcuugucuguaacggauuuuauuucuccuucacuuaugaagcuuuguuuggcuggauaugaaauucugggu

SEQ ID NO: 2009 - RNA, 80 nt, Homo sapiens
aggagcucuuuuagggcaggccugguggugacaaaaucucucagcauuugcuugucuguaacggauuuuauuucuccuuc

SEQ ID NO: 2010 - RNA, 91 nt, Homo sapiens
uacacuguugccucuuuuaaaagcaaagccacuuucuuguucuaagauuacaucaagacuugagcaguguguaguaauuaaaaugugugcu

SEQ ID NO: 2011 - RNA, 74 nt, Homo sapiens
cagaacaucuucgccuggugugguggaaaguccaacauccuggaacgcaacaaggcgagggaccuggcccuggc

SEQ ID NO: 2012 - RNA, 81 nt, Homo sapiens
uccaggcaugaugccaggugcaccaacuuacuuaauccucauagccaccaccugagcaagcuccuguuuuauaaauggacc

SEQ ID NO: 2013 - RNA, 77 nt, Homo sapiens
cuggugccccugcucacugggcccgagccugaacugagccccagcgggcuggcgggccuuuuuccugcgucccagcc

SEQ ID NO: 2014 - RNA, 103 nt, Homo sapiens
agauuuaaaauugagcagguuucuuuccagcaguagucagccauccggacagaaccguuccugugaugguguuacacugcugggagaggaaugucuugucuuc

SEQ ID NO: 2015 - RNA, 113 nt, Homo sapiens
gcugggaggcccagaggcugggcugggcgaguaucucuucgaaaggcucacucucaagcacgucuaagagccuuaugagcccagcgacuucugaagggccccuugcaaaguaa

SEQ ID NO: 2016 - RNA, 75 nt, Homo sapiens
cugggcucaaguguccugccuuccucggccucccaaagugcugggauuuacaggcaugagcugcugugucuggcc

SEQ ID NO: 2017 - RNA, 77 nt, Homo sapiens
uccuggccucaagugauccucuugucuuggccucccaaagugcugggauuacaggcaugagcugcugugucuggaca

SEQ ID NO: 2018 - RNA, 130 nt, Homo sapiens
gccucuuaaauuacugagauuacaggcaugagcugcugugucuggcccuauuccuguauucugacuccauaucucccuuccaggagguucagcuucuguguguccaugccuuuucaguuucuccaggccu

SEQ ID NO: 2019 - RNA, 91 nt, Homo sapiens
cgccgccgccgccgccgccgccucggcgcuugcagaacccagaagugaacagcaggcgacccggaagguuugcgcgcggcuccgcagcgag

SEQ ID NO: 2020 - RNA, 64 nt, Homo sapiens
gcaugauacaugugguuuagguucugaugauaaagcagugggcaggacacacacguucuuguuc

SEQ ID NO: 2021 - RNA, 75 nt, Homo sapiens
ggccgagacccagggcaccaccgaggcccgagaccugcauugucuccuggucacggugagucgggccucugcccu

SEQ ID NO: 2022 - RNA, 80 nt, Homo sapiens
ugcugcugcugcccgagcacgugcuggucaagaucuucagcuuccugcccacgcgcgcgcuggccgcccucaagugcacc

SEQ ID NO: 2023 - RNA, 135 nt, Homo sapiens
ucaggaggcugaggcaggagaaucacuugaacccgggaggcagagguauuggugagccaagaucgugccauugcacuccagccugggcaacaagcaugaaacuccgucuaaaaauguauacaaaguaaacugaca

SEQ ID NO: 2024 - RNA, 94 nt, Homo sapiens
ggcgugguggcgccugccuguaaucccagcuacucaggggaggaacugcuugaacccgugaggcagaaguuguagugggccgagaucgcgccac

SEQ ID NO: 2025 - RNA, 57 nt, Homo sapiens
accccaucaugucgcggggcuccaucgagauuccccuccgggacacugacgagguaa

SEQ ID NO: 2026 - RNA, 69 nt, Homo sapiens
ggccaccaugacccugcagggcuuggccaaccgcugcauguuccuaguagcccugaggcugcuggccaa

SEQ ID NO: 2027 - RNA, 88 nt, Homo sapiens
uguccgcuaccccguaguugcccugucuugugggcgccugcaaaagcgcagagauuuccgugagaccaacgcagccaugucuaauaaa

SEQ ID NO: 2028 - RNA, 77 nt, Homo sapiens
gccccucggaacaacuguauugcuguggagccucuugaggaguucuccgggcguggaacgggucuguuuccgggcuc

SEQ ID NO: 2029 - RNA, 68 nt, Homo sapiens
ugggggugagcacucuggucuggggcuugaggaugccuucaacaccucucuugguugaagcucucagu

SEQ ID NO: 2030 - RNA, 99 nt, Homo sapiens
gccgcgucuucccggaggcgacugcuggaagcugcagggaacagcugcggugcucugccauauugugucuuccccggccggucccucgccucccggccg

SEQ ID NO: 2031 - RNA, 119 nt, Homo sapiens
ggcccgugggagggaggcagaccccugggcuuuccugcuggccacggagacucugcuccugcauggaaagggagccugggagccagcagcccacgccuggggagccugccuggggccau

SEQ ID NO: 2032 - RNA, 101 nt, Homo sapiens
gggggagggagcgcgggcucgaggccggcgccggcacgaagcgcgcgucccgccaacccccggcacccgccggccucgcuucccgcgccucgcugcuccgg

SEQ ID NO: 2033 - RNA, 86 nt, Homo sapiens
ugcaagcuccucauguagggccauauugaaggaggugagccauucaccuguacccagugacggcgccucugugggcagacugcauc

SEQ ID NO: 2034 - RNA, 98 nt, Homo sapiens
ggcauggugacacauaccuacagucccagcuacucaggagggugaggcagggggaucacuugagcccgggaguugggggcuagagugaaccauguucu

SEQ ID NO: 2035 - RNA, 125 nt, Homo sapiens
gcccugaucucuaugguuuccgcggcucgcuagaaggagugugguccaccggaggacucccuacauucuuccuccauuaccucacugccuccgguggcugcugggauaccggaggacucgggucc

SEQ ID NO: 2036 - RNA, 91 nt, Homo sapiens
uuccgcggcucgcuagaaggagugcgguccacuggaggucucccuacauucuuccuccauuaucucacugccuccgguggcugcugggaua

SEQ ID NO: 2037 - RNA, 91 nt, Homo sapiens
uuccgcggcucgcuagaaggagugugguccacuggaggacucccuacauucuuccuccauuaccucacugccuccgguggcugcugggaua

SEQ ID NO: 2038 - RNA, 110 nt, Homo sapiens
gagugaaaaccacuccuuaggcaaugauuaagcugagagucagagggaugggugggaggccagcugucccaucugagcugcacuugaucacuagggaauuuaucauuucu

SEQ ID NO: 2039 - RNA, 78 nt, Homo sapiens
aagccgugagucaggccuggguuggccaccugggucacuggaggaccaaccccugcuguccaaaacaccacugcuucc

SEQ ID NO: 2040 - RNA, 105 nt, Homo sapiens
cgagucacgggcuggcuacgaacuccucgggggcgaagguggcggagagggauggguuccaggacguccuggcgcccggggaaggcucggcgggacggauuugcg

SEQ ID NO: 2041 - RNA, 123 nt, Homo sapiens
cugggucaggaauaccccaugucuucuccccaccuguagcaccaguuuuugacccauucccuagcagggaggagcuguaccugggacgcaccuggggacaggcaccuagguucaugccuaguc

SEQ ID NO: 2042 - RNA, 61 nt, Homo sapiens
agcucaguuacgaaguaggcugggccacauagaggacuggguccugcuggggcaggguucc

SEQ ID NO: 2043 - RNA, 107 nt, Homo sapiens
cugcugacuacaaacacaggcuggguuuugggggugcugacgcagcuuuguugugcugcugcuuccaguucugccggcucagugccuugugaccggggccgguggcu

SEQ ID NO: 2044 - RNA, 121 nt, Homo sapiens
cuugcuguccacccagcaggcgcagguccugugcagcaggccaaccgagaagcgccugcgucucccauuuucgggcuggccugcugcuccggaccugugccugaucuuaaugcugcaggaa

SEQ ID NO: 2045 - RNA, 59 nt, Homo sapiens
ucuuugcucaugggcuggaugggaauuaccccuccuccagugcaaugucaucauagacu

SEQ ID NO: 2046 - RNA, 138 nt, Homo sapiens
ugucuuuuauucucuuuccaucuuucuuugugucuuuuugauauuuguauugauaggcuuugacuuauuuuguuuuguguauuuauacaaauauuuuugugguacauuggggauuacauauaaccucuaaaagauaca

SEQ ID NO: 2047 - RNA, 105 nt, Homo sapiens
ucacugccuuaugcugugcugccucagaaauguuaaguaucaguugguagucugauaccaacuggaagggaauguuucuguucagaucucugcuugcuagugggu

SEQ ID NO: 2048 - RNA, 128 nt, Homo sapiens
ggcucggcgcccgcccgcuugcucuccucgcucgcucgcucgcuccgcggccccccaugcggaugugacauuucacgccgccgccauuuugagagcgagccgagccgagcugccgggcgccgcguccg

SEQ ID NO: 2049 - RNA, 74 nt, Homo sapiens
agugaaggcuggagccagggagcgcuggaggaaaccagcccuuuagccagcagccccuccaccacaggcacugc

SEQ ID NO: 2050 - RNA, 55 nt, Homo sapiens
ggaguaucugcauccugcgcucugggaacucccgugaggcaggagauccguccac

SEQ ID NO: 2051 - RNA, 58 nt, Homo sapiens
gcuggcccaggcccauguaagaaagaacacuuggauucuguggggccgugggaggugg

SEQ ID NO: 2052 - RNA, 102 nt, Homo sapiens
auguacgcauuaccauuagguuggggcaaagguaauugcgguuuuuuccauugaaaguaauggcaaaaaccuuaauuaccuuugcaccaagcuaauacaucu

SEQ ID NO: 2053 - RNA, 57 nt, Homo sapiens
ccagggccugcaccggauccauguggaugggagcagcgggcggcugcagcuguggca

SEQ ID NO: 2054 - RNA, 56 nt, Homo sapiens
ccuggaagcacagccuuggggacugagcaggcccucacugucacuuuaagaaggga

SEQ ID NO: 2055 - RNA, 139 nt, Homo sapiens
agacuacaagggcacugggugcuugaucaugcaggguauaaguggcucaaugauaacagcauaugaugguucauaugcucauugcucuuuuguauuguauuagacuccugauuagugucucacugucuggguugucuuu

SEQ ID NO: 2056 - RNA, 107 nt, Homo sapiens
cggggagaagccguacgugugccccgagugcgggcgagccuucagccagaacaugcaccugaccgagcaccagcgcacgcacaccggggagaagccguacgccugca

SEQ ID NO: 2057 - RNA, 66 nt, Homo sapiens
ccggggccgcggcggcuccucugccgggucgcgccggacgacuggcuucgggcggcggccccggcg

SEQ ID NO: 2058 - RNA, 67 nt, Homo sapiens
agccgccgcuuccgcccggcaguggggcaagcugaagugagaagccgcugggccugagaggagcucu

SEQ ID NO: 2059 - RNA, 146 nt, Homo sapiens
agggcuucuuuaaauuaauucggcugggugauuaauuauaaccccuccgaauugccugaauuucauaaaagaaagaaaaaugucuagcuuuuaugaaauuuaguaaauucagguggguuauuucuucagauauuuuuugcaucuuu

SEQ ID NO: 2060 - RNA, 71 nt, Homo sapiens
gggcgggggcggccgggauucccgugcgggguuggggcucguggcggaagcuccggaccucccuggcccga

SEQ ID NO: 2061 - RNA, 53 nt, Homo sapiens
auuuccagggcugagcagagcacuauguugcggcuuaagacgcucggcgauuu

SEQ ID NO: 2062 - RNA, 108 nt, Homo sapiens
gguuuccggccagugcuuauuuccggucuuucggaugcugacgcucucuuccugucuuuguggcuccggaaaggcguuugggaugccaacgguaaguccggaggcuua

SEQ ID NO: 2063 - RNA, 105 nt, Homo sapiens
cggcugcagagccgguaacggugguggcggcuguugggccaaaggcgaaagacgaagaggaggaggaagaggagccgcugccaccgugcgaggcggugcgcuggg

SEQ ID NO: 2064 - RNA, 85 nt, Homo sapiens
ggggcccucagccucagaugaccugcccugggcucuccaguuacagggagcagaagagccuuccuuugggcuagaaagguucugc

SEQ ID NO: 2065 - RNA, 64 nt, Homo sapiens
ggguguaccuggcugagucucuguggccgcggaggcgcggagcuaagcggcucggauuauccug

SEQ ID NO: 2066 - RNA, 57 nt, Homo sapiens
acccggcuccgagcggcggcggcccggcuuccgcugcccgugagcuaaggacggucc

SEQ ID NO: 2067 - RNA, 81 nt, Homo sapiens
agugcuucaugcuguugucaacacuaacuuuacaggugacccaggaaauugugaaguaguuggggccguagaacagacuuc

SEQ ID NO: 2068 - RNA, 136 nt, Homo sapiens
cuccgugcccagcuaauuuuuacauuuuuaguacagaugggguuucaucauguucggcaggcuggccucgaacuccugagcuugagcgaucugcccaccucagcuucccaaagugcucggauuacaggcaugagcc

SEQ ID NO: 2069 - RNA, 157 nt, Homo sapiens
agucacuuuaguggccaccuugcuuaucagauugacugucgcaauaucacagugcuuguguucagauaacccuuauucuacucaguaauggccucaaaguacaaaaauagugauguuggcaauuuagauaugcuaaagagaagccuuaaacugcuuc

SEQ ID NO: 2070 - RNA, 64 nt, Homo sapiens
cggaagcuccagggugggaguaguucccugcuaagggaggguagacuguccaaccuguuccggc

SEQ ID NO: 2071 - RNA, 118 nt, Homo sapiens
cccaggaaggaggcuccgcugguuccgcugggucaggcgcugacgggaccgggcugcggcaaucguuagcgggucaugucggccgcccagggcugggacaggaaccgccggaggggag

SEQ ID NO: 2072 - RNA, 68 nt, Homo sapiens
guguccggaggcgcuguuccagccuuccuuccuggguauggaaucuugcggcauccacgagaccacgu

SEQ ID NO: 2073 - RNA, 53 nt, Homo sapiens
cgagaacccauuccucaauggagaggucauccggcuggauggggccauucgua

SEQ ID NO: 2074 - RNA, 66 nt, Homo sapiens
aucgcagacagggacacauggagaacgcccccaccaguucccacgugcuucucuuuccgcagguac

SEQ ID NO: 2075 - RNA, 69 nt, Homo sapiens
gucucuaccaaagcucauguggaauguuaaugggaaauguuaaaggcgggggcucguggaaggugauuu

SEQ ID NO: 2076 - RNA, 66 nt, Homo sapiens
gucucuaccaaagcucauguggaauguuaaugggaaauguuaaaggugggggcugguggaagauga

SEQ ID NO: 2077 - RNA, 134 nt, Homo sapiens
ggcaucauugcauuuugcaaugugagaaagacaugaacuuugggggaccagggacagaauaauauguuuuggcucucugucucuaccaaagcucauguggaauauuaaugggaaauguuaaaagugggggcugg

SEQ ID NO: 2078 - RNA, 168 nt, Homo sapiens
ugagagacucuagggaaggcaucauugcauuuugcaaugugagaaagacaugaacuuugggggaccagggacagaauaauauguuuuggcucucugucucuaccaaagcucauguggaauauuaaugggaaauguuaaaagugggggcugguagaaggugauuucauc

SEQ ID NO: 2079 - RNA, 54 nt, Homo sapiens
cucucugucaggguacucagaggaaaggucagggaaccagggcaugugggagaa

SEQ ID NO: 2080 - RNA, 111 nt, Homo sapiens
ggccccggggccuccagcggcaccagcggagaccacggugagcucgucguccggauugccagucuggaaguggagaaccagagucugcguggcggugaggccccgggccag

SEQ ID NO: 2081 - RNA, 87 nt, Homo sapiens; identical to SEQ ID NO: 1448

SEQ ID NO: 2082 - RNA, 54 nt, Homo sapiens
gugagccuugaagguccagaagggaagcugaagggccccaaguuuaagaugccu

SEQ ID NO: 2083 - RNA, 54 nt, Homo sapiens
gugagccuugaagguccagaagggaagcugaagggccccaagcuuaagaugccu

SEQ ID NO: 2084 - RNA, 58 nt, Homo sapiens
ccagcuaguggacaucucccaggacaacgcccugagggaugagaugcgagccuuggca

SEQ ID NO: 2085 - RNA, 64 nt, Homo sapiens
ggccgagugcaucgccugcuccgcaaaggcaacuaugcggagcgggucggugcuggagcgccgg

SEQ ID NO: 2086 - RNA, 59 nt, Homo sapiens
ucugccggcugcgggucguugggggggccccaugccaacggccacggaggccaaggacc

SEQ ID NO: 2087 - RNA, 68 nt, Homo sapiens
ccugcgagcggcugcugagccggguggccgcccuguuccccgcgcugcggccuggcggcuuccaggcg

SEQ ID NO: 2088 - RNA, 72 nt, Homo sapiens
ccggcugcagcaggaaggggagcggauccgcagugugcuggacggcccugugcugagcaacauugaccggau

SEQ ID NO: 2089 - RNA, 97 nt, Homo sapiens
ugcucaagccggaagagugcugggcagcuugguccugcugcuugcugucacaagcagggcccugcugaccugccuucuggacaacucugcuugcagc

SEQ ID NO: 2090 - RNA, 111 nt, Homo sapiens
cccggcuucuucgucacaggagaccgcgccgguggccggagcuggugccugcggcggguggggaugagcgccggguggcugcugcuggaagaugggugcgagguacggggg

SEQ ID NO: 2091 - RNA, 92 nt, Homo sapiens
ggcuggccggcugggucuccucccgggcucagugggccuggggccucucugacguggugccugcuggagggaggcucgucgucaccagcuga

SEQ ID NO: 2092 - RNA, 68 nt, Homo sapiens
ggccuguucugucucugagcucuguguccuccguucauuccauggcugggagucacugaugcugccuc

SEQ ID NO: 2093 - RNA, 88 nt, Homo sapiens
ccuucaagaugaagauguccgucauccugggcgucgugcacauggccuuuggggugguccucggagucuucaaccacgugugagggcc

SEQ ID NO: 2094 - RNA, 179 nt, Homo sapiens
aacuucugagcuuaagccaacaucuugcuugucuccugaguagagggacuauaggcaugugccaccacaccuggcuuaaaugugucauuuaaaaauucaggccaggcacaguggcucaugccuguaaucccagcaauuugggaggcugaggcaggcggaucaccugaggucaggaguuc

SEQ ID NO: 2095 - RNA, 83 nt, Homo sapiens
gcgacuauaggcaugugccaccacaccuggcuuaaaugugucauuuaaaaauucaggccaggcacaguggcucaugccuguaa

SEQ ID NO: 2096 - RNA, 146 nt, Homo sapiens
auggcugcaacagaaaaagccauuguguaccacagugucuauuuagccaauuguccaucuuuagcuauucugaaugccuaaagauagacaauuggcuaaauagaaauugugguacauccauacaauggaauaccaugaagccaucg

SEQ ID NO: 2097 - RNA, 112 nt, Homo sapiens
ggccgcuaaagugugacgagcccauccucagcaaccgaucuggagaccaccguggcaaauucaagguggcguccuuccguaaaaaguaugagcucagggccccgguggcugg

SEQ ID NO: 2098 - RNA, 82 nt, Homo sapiens
ccagagaguccuucgggcgcgugaccucgggguugucgggcugauacgggacccccaccguggccgaggccagaaccugguu

SEQ ID NO: 2099 - RNA, 101 nt, Homo sapiens
gacagaguuugaaacagucaucugggggaacucacauagaaaauagaaaucucagcuauucuaggcgagguccugccuagaauacuguugaacagugucuc

SEQ ID NO: 2100 - RNA, 87 nt, Homo sapiens
ugugcagggaagaaaugagaaauacugugcccugaggcuggacaaggggaauuucuccuggggcucagaguguuguacuugcacaac

SEQ ID NO: 2101 - RNA, 72 nt, Homo sapiens
aguaacaagaaauaccgugcccugagguuggacgugggggaauuucuccuggggcucagaguguuguacucg

SEQ ID NO: 2102 - RNA, 59 nt, Homo sapiens
cucccaaagcaaccugucaucaugaaggccaaauucuucagcagaagagcugaggagaa

SEQ ID NO: 2103 - RNA, 122 nt, Homo sapiens
cacuagugaagaagcagaugaggacccuguuuauuguuucucuccaagaaauucuccaagaauauuguuucuuggagagaaauaauaaauaaacaagacaauuucugaaagcaauaagugca

SEQ ID NO: 2104 - RNA, 53 nt, Homo sapiens
guggagccaggaauuacaucuuauuuauuuugaauuccuagcaaccuucauug

SEQ ID NO: 2105 - RNA, 88 nt, Homo sapiens
cacagcucccuagaggugaaguugccaggucauagacuagaauaguuucacuagaucuugacauguugcucuccaaaaggguuguguc

SEQ ID NO: 2106 - RNA, 128 nt, Homo sapiens
uaucccgugguuggcaguguccuguccauucuucuugcacuggccugucccucaggagacaggugugagugguccugagcuugggccaguguaagaguaggggacagguuucucuccuuguagguguc

SEQ ID NO: 2107 - RNA, 73 nt, Homo sapiens
uuugauguguagacauugugauaagguagauaauugugauaacuauuuauugcuuguuuaaacugcucaagua

SEQ ID NO: 2108 - RNA, 129 nt, Homo sapiens
cggcuacgugguaaaggagacaauuggugugggcuccuacucugagugcaagcgcuguguccacaaggccaccaacauggaguaugcugucaaggugggccuccugaccacgucucggccaaggcugcu

SEQ ID NO: 2109 - RNA, 64 nt, Homo sapiens
gaccacugucuccugguacuggacuaucuaccugccuugucccuguucugggggaaggugucca

SEQ ID NO: 2110 - RNA, 92 nt, Homo sapiens
agaaugcaggaaagagaucgaagagagagaaaagaaaggugacguggugccauggguuggggggcuucuuugcagacucacucugcaucuga

SEQ ID NO: 2111 - RNA, 92 nt, Homo sapiens
aguggcuacagcacuggcuuuagaggccgcccugagugcaagucuuggcuuugccacuuguuggccguggaaccauucgagcaaguuacuca

SEQ ID NO: 2112 - RNA, 106 nt, Homo sapiens
uucugaguaaauuauuuuuuauuggaggauucuuuuuuuuuuaaauuggagaagcugugaagguguuaaaacgagaaucuuaccaauucacaauacgauaagaaau

SEQ ID NO: 2113 - RNA, 107 nt, Homo sapiens
ggccuggccgaggacaucgauaaaggcgagguguccgcccgucaggagcucaagcagcgggcgcgcuaccuggccgagaaguacgagugggacguggcugaggcccg

SEQ ID NO: 2114 - RNA, 92 nt, Homo sapiens
auuauuugauaaagcacaggucuuucucagagcacacucaaugaaagaguacuaagaguuuacucugggaaaaccaaaucuaaaaauaauua

SEQ ID NO: 2115 - RNA, 71 nt, Homo sapiens
gaaccguacuugagcagguucuuccaauauagcuaucugagcuccccaaggacugaccagggaccuuucca

SEQ ID NO: 2116 - RNA, 87 nt, Homo sapiens
ucccaguaaggugaaacacaacucuguauaccaagauauauccaugguaccucgauauacauauuugcagguuucuuuuuugggagg

SEQ ID NO: 2117 - RNA, 59 nt, Homo sapiens
ugugacaaggacacguucgguccccacuuuacaaguaagggacacggccucucagcaac

SEQ ID NO: 2118 - RNA, 72 nt, Homo sapiens
uuguuuagaggagauggcauuuaaaacaggacuugacacuuuaaguuccuaaagaaggcauuccaaucagaa

SEQ ID NO: 2119 - RNA, 121 nt, Homo sapiens
ucauagacugaccuucuuuuggaauuucugagucauuuauuuuccuuagcuuuuuccacucaaauuaagggcaagcgaaaaaguaauaauuuggcauucuuuaagccuacagaaugugauu

SEQ ID NO: 2120 - RNA, 68 nt, Homo sapiens
gugggcuucuuucucuggcacauuuuuuaaaugcuccuuuaguuaauaugcaggagggauuuccaugu

SEQ ID NO: 2121 - RNA, 74 nt, Homo sapiens
uuucagaaaacucaggcgaggcaguugcgagggcacaacucaaugcccucgugaggccucaacucucuggggcc

SEQ ID NO: 2122 - RNA, 52 nt, Homo sapiens
gguaaggcaguugcgagggcacaacucaaugcccucgugaggccucaacucu

SEQ ID NO: 2123 - RNA, 109 nt, Homo sapiens
ccccagucccugggccucagggugaaaggcacauggggcugaguccacuuggacaaaugccuccugugcuuugcaauggcccugaacuccccuccuaggaacaagggug

SEQ ID NO: 2124 - RNA, 85 nt, Homo sapiens
cacagccaggguauccaggaugccaaccguugggucccuacccuccuccauacccaccgccugccccuggaaucccuccugugaa

SEQ ID NO: 2125 - RNA, 59 nt, Homo sapiens
ugugccacagccaggguauccaggaugccaauccucgggucccuacccuccuccauacc

SEQ ID NO: 2126 - RNA, 85 nt, Homo sapiens
cacagccaggguauccaggaugccaauccucggguccccaccuuccuccauacccaccgccugccccuggaaucccuccugugaa

SEQ ID NO: 2127 - RNA, 108 nt, Homo sapiens
gugccacagccaggguauccaggaugccaauccucgggucccuacccuccuccauacccaccaccugccccuggaugccuccugugaaucccuuggcuccuggcaugu

SEQ ID NO: 2128 - RNA, 107 nt, Homo sapiens
gguagaccauucugugcggaucaauucugucggcagcaccgcuuccuccucccagccucugcuugugcacgacgaugucugagcagaaucaguguuugggucacccc

SEQ ID NO: 2129 - RNA, 67 nt, Homo sapiens
gacugauaccuuggaggcauuuuaucuaagauacacacaaagcaaaugccucuaagguaucaguuua

SEQ ID NO: 2130 - RNA, 61 nt, Homo sapiens
uguacccuggcauugccgacaggaugcagaaggagaucacugcccuggcacccagcacaau

SEQ ID NO: 2131 - RNA, 70 nt, Homo sapiens
gcgcuuuccccugacuuucuggaguuucuaaaaguagacuguacgcuaagggucauaucuuuuuuuguuu

SEQ ID NO: 2132 - RNA, 61 nt, Homo sapiens
ccgcaguuugcaugagaugaaccccucugaccagagcccaucuccucaggacuccacgggg

SEQ ID NO: 2133 - RNA, 92 nt, Homo sapiens
auuuguccacaaucagccauuggccugucuggggaguuuuuggaagacagcaaagaggggcaauggcugcuuucagcuuugaggacagaugc

SEQ ID NO: 2134 - RNA, 105 nt, Homo sapiens
gucgucagccucugcccugggcggugucaaaguggagaggcaggucuuuggggaggccaccaagcagccaggcaucaccuucaucgcagccaaguucgauggcau

SEQ ID NO: 2135 - RNA, 65 nt, Homo sapiens
gcagcgaggucucggcuuuccgccugcuuuaagccacgcggaaacugcugcacccuugacugcac

SEQ ID NO: 2136 - RNA, 80 nt, Homo sapiens
caggacaggcugcugagcaccacuacauugagcaugaugugucuccuguauguguguuucaugugaaguauuguucugau

SEQ ID NO: 2137 - RNA, 55 nt, Homo sapiens
uuguaggacuuguuccugugggcuucagugaugggauaguacacuucacucagag

SEQ ID NO: 2138 - RNA, 124 nt, Homo sapiens
ccugggcucaagcaauccuccugccucagcuuccaaguagcuaggacuacaggcuugugccaccagacccagcuaauuuuuuuuuuuuuugguagaguaggagucuugccauguugcccaggcu

SEQ ID NO: 2139 - RNA, 84 nt, Homo sapiens
ccagccugggugacagagcaagauuccauccaaaaaaaauuuuuuuauagagacaggagucuugccauguugcccaggcugguc

SEQ ID NO: 2140 - RNA, 72 nt, Homo sapiens
gcagagguacaggcuugguuacagggcuucgcguuccuuuccagcacaggccugcucugggccgcccugccu

SEQ ID NO: 2141 - RNA, 93 nt, Homo sapiens
uaggcggacuaugacuuaguugcguuacacccuuucuugacaaaaccuaacuugcgcagaaaacaagaugagauuggcauggcuuuauuuguu

SEQ ID NO: 2142 - RNA, 127 nt, Homo sapiens
cagccggacugcaucucccggcgugccccgcggcgggcgcugggccggagccggagcccaagccagagcggcgcggccuggaagaggccagggcccgggggaggcggcggcagcggcggcggcuggg

SEQ ID NO: 2143 - RNA, 69 nt, Homo sapiens
uugggaaggagaggcacauaacuuuuuuuaacauuugguaacuagguuaugggcucuacauugucagcu

SEQ ID NO: 2144 - RNA, 63 nt, Homo sapiens
cucgggguuccucagcuggcugagguggagucagugucagucagggaggcgaacugcugagca

SEQ ID NO: 2145 - RNA, 121 nt, Homo sapiens
agggggaugggguggggggguugggugcugcuggagccccugcucugcugcuacccagugccuggcaguccagggguuaaagcaccacacaaagccagcucaggcaaucuucuccuccucc

SEQ ID NO: 2146 - RNA, 98 nt, Homo sapiens
uuuuugcauacaucagaaaaacaacuacuguguccaguucccugauugaccucagcagaugaagugaacagauaguguuaauucagauuggagaaauu

SEQ ID NO: 2147 - RNA, 80 nt, Homo sapiens
gcugccgagauccuccugugcucaacggauccucccaccucagccgccgaguaucugggaccacgggcacucuccagcac

SEQ ID NO: 2148 - RNA, 59 nt, Homo sapiens
uauguuaaguuucuacuaugugcuguguauugguacuauaaauaugaauaagacauaag

SEQ ID NO: 2149 - RNA, 84 nt, Homo sapiens
caggggcacauugggguggaugccucugcuccccaaauuggggguagcaucacuggccccaguguggaaguucaggccccugac

SEQ ID NO: 2150 - RNA, 85 nt, Homo sapiens; identical to SEQ ID NO: 1501

SEQ ID NO: 2151 - RNA, 99 nt, Homo sapiens
agcucugggcuucagcacaacagacaccagccuguggucucucagaagccagggagaccacaucgggcucaggacguuuuacccaaaguccagaguuuu

SEQ ID NO: 2152 - RNA, 56 nt, Homo sapiens
cgggcgccgccucaucguuguccucggacaccggggacaauggugacuacaccgag

SEQ ID NO: 2153 - RNA, 94 nt, Homo sapiens
cuugcagguagaugagauuuaccacgaugagucccuggggguucauauaaauauugcccucguccgcuugaucaugguuggcuaccgacaggua

SEQ ID NO: 2154 - RNA, 88 nt, Homo sapiens
gcccaccauagggucugugggaaauggaaauggugacuccacacaggaaacacggcuccaccucaugagaagccugggaaacgggcau

SEQ ID NO: 2155 - RNA, 122 nt, Homo sapiens
gucuugugcaguuuugccccuguggcuuugcaggguacagaccuccuccuggcugcuuucaagggcugucauugagugucugcagcucuuccagguucacagugcaaguuaucaguggaucu

SEQ ID NO: 2156 - RNA, 98 nt, Homo sapiens
cccgggccgucuuccccuccaucguggggcgccccaggcaccagguaggggagcuggcuggguggggcagccccgggagcgggcgggaggcaagggcg

SEQ ID NO: 2157 - RNA, 75 nt, Homo sapiens
gaagacaggccgagugaugcuuggggagaccaauccagcagauucuaagccaggcaccauucguggggacuuuug

SEQ ID NO: 2158 - RNA, 95 nt, Homo sapiens
gcgcuugcgccgaucucggccucagcgugagcaugcgcagguccccgcccucgcugcguuugcgcuugagcgccgauaauuugguggcggcgucc

SEQ ID NO: 2159 - RNA, 116 nt, Homo sapiens
agcggaagucacggggagcuggcggcuggguugggcggcggaucugcagaguuucgagguucugucaaguucgcugcccgccgcccaacuugaagccucauuuaccuuucggcuac

SEQ ID NO: 2160 - RNA, 54 nt, Homo sapiens
gccugacucagcaugagccuggcuucuccugccggccggcacagggguggguac

SEQ ID NO: 2161 - RNA, 124 nt, Homo sapiens
gucgccgggggagcggguggcguguggauucgcccuccugcccgccccuccgggccgcggacacacgcccggcagggaggcggcggcggccccugcguauuugcuucccuccauuuggggacug

SEQ ID NO: 2162 - RNA, 106 nt, Homo sapiens
ugcuucucucuuucgcucaggcccguggcgccgacaggaugggugagcuguuguggccgguuuaagggcgcugcaagcgggacuuggggucuuggggacgggcggg

SEQ ID NO: 2163 - RNA, 62 nt, Homo sapiens
ggcccgggcggcuggccucaccgcccacuggguaaggaggcucaagcugagcccggcgcugc

SEQ ID NO: 2164 - RNA, 159 nt, Homo sapiens
cuuuguccugcggcgggcccgauaagaaguccuccuggcggggcucggggugguggggggcggggagaugaacgcugcggccagcagcuaccccauggccucccuguacgugggcgaccugcauucggacgucaccgaggccaugcuguacgaaaaguu

SEQ ID NO: 2165 - RNA, 62 nt, Homo sapiens
guaacgcgugcugcgcuugcagugagccuacugggcuuucugcagcugggggauugguaugg

SEQ ID NO: 2166 - RNA, 82 nt, Homo sapiens
ggaggcugcgggggucccggccucugcggucucucuggccggccgcagcuguggcgcgggugaaacgcccgcccuccuccuu

SEQ ID NO: 2167 - RNA, 134 nt, Homo sapiens
ccugcaguacguucuggcgcacccguccgagucccuggagaagaugacgcugcccaaccuuccgcggcugagcgcguggguccgagagcagugcccggggccggguucacggugcaccaacaucaucgcggggg

SEQ ID NO: 2168 - RNA, 163 nt, Homo sapiens
uggcugagcagcgugcccgggcccggcucucuagcgcuuaucugcugggaguuccaggcucagagcagccugaccgcgcuggcagccuggagcuucguggcuucaagaauaagcuguacguggccguggucggggacaaagugcagcucuacaagaaucuaga

SEQ ID NO: 2169 - RNA, 84 nt, Homo sapiens
ggcuguggcuuguaggggaggcagaaauggcugaggugcggauacgagaccugagucacuugagcugcuguugccacauguccc

SEQ ID NO: 2170 - RNA, 77 nt, Homo sapiens
gccaggucggaaguagugugaggcucgugggcggagccaagcgccgccauguccgccgcccugcugcggcggggccu

SEQ ID NO: 2171 - RNA, 101 nt, Homo sapiens
gcagggucugccuggcgaagcccugggcugcccugcgggugugggcacccccgugccagcagauggcacucagacccuuaccugugcacacaccucugcuc

SEQ ID NO: 2172 - RNA, 116 nt, Homo sapiens
ggaggaggcuccggcgcaggcgcagacgcagggcgggcaauggccgccugggucucucgggcagcccugcccaccucucucgcgucuccuggucuuggccugcggcucucuuucug

SEQ ID NO: 2173 - RNA, 137 nt, Homo sapiens
uccagaguacgggucgagcccgggccauggagccccccuggggaggcggcaccagggagccugggcgcccggggcuccgccgcgaccccaucggguagaccacagaagcuccgggacccuuccggcaccucuggaca

SEQ ID NO: 2174 - RNA, 70 nt, Homo sapiens
gggccauggcagauuccuggcagcugcccagagcccugcucaugagccagcuccaggggccccagccccc

SEQ ID NO: 2175 - RNA, 67 nt, Homo sapiens
aggcgccuccagcagcagcucgcucagcagaugcagcagcucaacacugccaccugggggaaccuga

SEQ ID NO: 2176 - RNA, 139 nt, Homo sapiens
cgccgcaggucgaguaccggguggcaaagcagcuggcccgggccguggaagguggccaggccaccgcggccugugacgcgcaccucggcgcccaaggcccguagccgcgcaguuuccucgggcgucaggccgccgcgca

SEQ ID NO: 2177 - RNA, 103 nt, Homo sapiens
gggggcucaugagcaggggaagugggaagggaaauuugguggacacucaucccaguuaagcaaggccaucacccucucccuucccagggcuuccugccuucuc

SEQ ID NO: 2178 - RNA, 53 nt, Homo sapiens
cugcucgcugggccgcggcucccgggugucccaggcccggccggugcgcagag

SEQ ID NO: 2179 - RNA, 133 nt, Homo sapiens
cccucuuacgucucugugcuuguggcucuggggaaccugggucugcugguggugacccucuggaggaggcuggccccaggaaaggacgagcagguccccauccggguggugcaggugcugggcauggugggca

SEQ ID NO: 2180 - RNA, 62 nt, Homo sapiens
uccguggguggcccccugugguguccccagcauugaacacagcagcacgucccucaugggug

SEQ ID NO: 2181 - RNA, 105 nt, Homo sapiens
uccacggggggcugaggacagggguaagucuggggagauggggggagcucugcugagggugcacaaggcccuggcucuacacacaucccugucuuacagaggaua

SEQ ID NO: 2182 - RNA, 114 nt, Homo sapiens
aagacucagaggccgccaucaaccgccagaucaaccuggagcucuacgccuccuccauuuaccugugcguggcuuacuacuuugacagcgaugauguggcuuugaagaacuuug

SEQ ID NO: 2183 - RNA, 77 nt, Homo sapiens
ggugagcagagcccagcccaguggaaauggccaugauacagugaucgcgucucaucccuugcugugcccuccaccca

SEQ ID NO: 2184 - RNA, 66 nt, Homo sapiens
uggccaaggagcuggaggagaagagugaccgucugcucaagguccucuuccuggugcugggcuaca

SEQ ID NO: 2185 - RNA, 108 nt, Homo sapiens
ugucaagcagggcgguucuagagagaguggagguggagccuuucccugccuguccaacagccuccgagauuuugccucucucugccugggauuccuccucuuggcguc

SEQ ID NO: 2186 - RNA, 135 nt, Homo sapiens
aagcuggucuguuaucugcccugaguccugcaagaacaucucaagaaaaauaccaaaaacaugcaagacaaaugaggguccuucuuuaguguguucuugaagcacugaggugccugaaaguuauauauaguuucu

SEQ ID NO: 2187 - RNA, 76 nt, Homo sapiens
agcucugacaggaggugcguggcccaggaggagccaucaggccaguucucugggauacugcugugucuccagcucu

SEQ ID NO: 2188 - RNA, 82 nt, Homo sapiens
gggcaguagcaucuuuuccucaccucguauugccaguaacuggagcaauaugagguagggagaagaugucuccaugaccugc

SEQ ID NO: 2189 - RNA, 95 nt, Homo sapiens
agauccugagucaaugauucgggugcaaguagauuucuucugggagccuuucuuuaauaaagcacuugcaccugagucauugacucaggaucuau

SEQ ID NO: 2190 - RNA, 74 nt, Homo sapiens
aaugcagauucuugggccucacccagagcugccaagcagaagucccuuggguggggccuaggaaucugcauucc

SEQ ID NO: 2191 - RNA, 143 nt, Homo sapiens
uggcagucucagcaucaccugcaaacuuguuagaaaugcagauucuugggccucaccucauacuuacugcaucagaagugccaggauccaggcccagccaccuguguuucagcaagcccugaugcagcuacaccacugcuaua

SEQ ID NO: 2192 - RNA, 75 nt, Homo sapiens
aaaugcagauucuugggccucaccccacaguacugaaucagaaacucugagggugggcccagagucuguguuuga

SEQ ID NO: 2193 - RNA, 85 nt, Homo sapiens
ggcgcccugcugcggucgccgcgagccucggccucugucuccucccccucccgcccuuaccuccacgcgggaccgcccgcgccag

SEQ ID NO: 2194 - RNA, 68 nt, Homo sapiens
gguggacaggcucuggcagccgggcagugcccuccccgucccaugcucggcgagccucccucuacucg

SEQ ID NO: 2195 - RNA, 63 nt, Homo sapiens
cuggaagagguggcccagaggucccaugcugugggauccccaggcagcccccucauucuggag

SEQ ID NO: 2196 - RNA, 92 nt, Homo sapiens
gcgugcucgaaggaugccauggucagggcagggccuccagagcagguguugugccuggagcugcucuccuggccuccuuggauuuaucgcaa

SEQ ID NO: 2197 - RNA, 92 nt, Homo sapiens
gcgugcucgaaggaugccauggucagggcagagccuccagagcagguguugugccuggagcugcucuccuggccuccuuggauuuaucgcaa

SEQ ID NO: 2198 - RNA, 143 nt, Homo sapiens
cuuccccccaacucccuccuucugaucucuucuuuuuaaucuguucccauuuuccgaguuaaguucuauuuccaaaacuguucucuggagcuauaaguggauugccagaaaugagagauuaggagcugggagaagaggaagcg

SEQ ID NO: 2199 - RNA, 62 nt, Homo sapiens
ggcccuggcaggugagccugagaguccgcgaccgauacuggaugcacuucugcgggggcucc

SEQ ID NO: 2200 - RNA, 72 nt, Homo sapiens
ugggucaguucagagguccucggggcgcgcgucgagucagccgugugcgcagggagaccucucccacccaca

SEQ ID NO: 2201 - RNA, 87 nt, Homo sapiens
ugcuuccuaauucucaguccucgaguccuaccuccgaucucaagaaaaggugaggauuucagagaggccauaaaaaggagaagcaag

SEQ ID NO: 2202 - RNA, 64 nt, Homo sapiens
ggcaguucuugcugccccuucucuggcugugcuuugccugagggaagaguuggcaagaggccag

SEQ ID NO: 2203 - RNA, 114 nt, Homo sapiens
acaauugucuaacuuuuuauuuuuggucuggcuguuguggugugcaaaacuccguacauugcuauuuugccacacugcaacaccuuacagauguggaagaugugaaauuuguca

SEQ ID NO: 2204 - RNA, 134 nt, Homo sapiens
aggaugcugcucucaugggagcuggccucugaccugucuugggcaggucccaggcauuccucaucuguuagaggccagcaaugcccaggucugcccuagacaggccagcaggaauggagaggagggguuccuca

SEQ ID NO: 2205 - RNA, 120 nt, Homo sapiens
ggcgagguguccgcccgucaggagcucaagcagcgggcgcgcuaccuggccgagaaguacgagugggacguggcugaggcccgcaagaucuggugcuuugggcccgacggcaccggcccc

SEQ ID NO: 2206 - RNA, 138 nt, Homo sapiens
ggggucaaugugaugagaggcacaaagcuuguggccucccuacaaacaaaugccuacaugugaagaggaaaaaaaauuauagaaucuggguaguggguguauggguguucacuguauaauucuuucaacaaucuccua

SEQ ID NO: 2207 - RNA, 95 nt, Homo sapiens
agacuuuucuuuuuaaggaagugcuguuuuuuuuugaggguuuucaaaacauuuugaaaagcauuuacuuuuuugaccacgagccaugaguuuuc

SEQ ID NO: 2208 - RNA, 131 nt, Homo sapiens
gucauuggcauguaagagaaauauaccugcauguuagucuaacguucugauagaaaugacaugcauuuaugcugccauuuguuacuaucaggacucgacucgugugcggacauuucuguuaauaaugacag

SEQ ID NO: 2209 - RNA, 54 nt, Homo sapiens
uuagcucccagccuacucccucugccgucagaagccagugggacucagcuaaaa

SEQ ID NO: 2210 - RNA, 64 nt, Homo sapiens
gccuugagaguuaagcgaagugugguggcuuccaagguaccgacacuugccguaggcugggcuu

SEQ ID NO: 2211 - RNA, 58 nt, Homo sapiens
auuuggagauggaagaagcuaugaaagcaaacuaauagguucucuguaaaacaaguag

SEQ ID NO: 2212 - RNA, 61 nt, Homo sapiens
aguguacaaugaagcuggugugaccuucacauagauggaucauggcugacuuccucacuau

SEQ ID NO: 2213 - RNA, 55 nt, Homo sapiens
acacuaaugcuuguuggauucaugagguggccagaccaacguguuuuuuuuguuu

SEQ ID NO: 2214 - RNA, 95 nt, Homo sapiens
uuacuugcuagagaaucuguuuuaauauagugguuuggccucugauuauuuauagguuuuauaaauuuuagaaucaauuucucuuuaagguggcu

SEQ ID NO: 2215 - RNA, 60 nt, Homo sapiens
aauggauuuucugagaaguucuaccuaauuguaauagaaugcacucaagacaaccguuca

SEQ ID NO: 2216 - RNA, 85 nt, Homo sapiens
gcacagagaccgugaagauuccaaguucaggagaacucgaccggucaguuuccuuuccuaagagucucuuaccugcuuguuguac

SEQ ID NO: 2217 - RNA, 52 nt, Homo sapiens
aguguuuguugauuuuuguuccucaguuuagauuugaaaacacaugcauuaa

SEQ ID NO: 2218 - RNA, 108 nt, Homo sapiens
ggaacaaagucacuccaguguuauauuugaauuaugggcccuacgguucuuaugcaccgcauuaugacuccacauuugcgaauaucagcaaggaugauucugauuuaa

SEQ ID NO: 2219 - RNA, 90 nt, Homo sapiens
aagaugugacucgcuacuccuugccuuccacuaucguugugaggccucugcagccauguggaacugcaaauucuccauuaaaccucuuuc

SEQ ID NO: 2220 - RNA, 99 nt, Homo sapiens
acauagugugugaguugcuccuccuugccuucugccaugauugugaagccuccccagccauguggaacugcaaaugcaauaaaccucuuucuuuuguaa

SEQ ID NO: 2221 - RNA, 68 nt, Homo sapiens
agaauuguaaguuucuugaggcuuccccagccauguggaacugcaaaucaauuaaaccucuuuucuuu

SEQ ID NO: 2222 - RNA, 57 nt, Homo sapiens
auuaucaccucccaccaugauucugaggccuccccagccauguggaacugcaaaucc

SEQ ID NO: 2223 - RNA, 121 nt, Homo sapiens
gcagccucgccgcaacccuguuggccaaccacagccugcgugagcuggaccucagcaacaacugccugggggacgccggcauccugcagcugguggagagcguccggcagccgggcugccu

SEQ ID NO: 2224 - RNA, 65 nt, Homo sapiens
uauuaagguucuccuugcccugaagcuucaggaugaaggacaggaagcugaaggagaaaaguaca

SEQ ID NO: 2225 - RNA, 59 nt, Homo sapiens
uuuuuuuuuuuuuuuuuucuggucacagcgauugaacaggagaagcaagcaggcgaauc

SEQ ID NO: 2226 - RNA, 125 nt, Homo sapiens
ccagcagguguucgacaauggcagcaucuacaacccugaagugcuugauaucacagaggaaacucugcauucucgcuuccuggagguauaugcugucagccuugcccccucuuacacugaugguu

SEQ ID NO: 2227 - RNA, 68 nt, Homo sapiens
uacuuaugucuagguuccuuugguaucauccacaagugagggguacacagcaucucaacccuuguacc

SEQ ID NO: 2228 - RNA, 101 nt, Homo sapiens
acuaaggucaucuuuuauagggucgucuaaggacaguugccuuaaugugaagacuccuauagucccuguggaggaccugcccuacacacucagcauggucg

SEQ ID NO: 2229 - RNA, 90 nt, Homo sapiens
aguggagauuaggucugauguuucuuuguugauuuucuuucuggaagaucuguccagugcugaaagugggauguugaaguuuccagcuau

SEQ ID NO: 2230 - RNA, 78 nt, Homo sapiens
uguccagugcugaaagugggauguugaaguuuccagcaauuacuguguuggaguccaucucucuuuagcucuaauaau

SEQ ID NO: 2231 - RNA, 58 nt, Homo sapiens
aaagugggauguugaaguuuccagcuauuauuguauuggggucaaucucucucuuuag

SEQ ID NO: 2232 - RNA, 57 nt, Homo sapiens
ugaguuggggauuccaucauuucauuuaagaggugaagagggauuuaauuauuuaau

SEQ ID NO: 2233 - RNA, 64 nt, Homo sapiens
agucucuuucaaaggagugugauuuaaaagcccaucauaaucggaggcuuuggcaacuggcuag

SEQ ID NO: 2234 - RNA, 90 nt, Homo sapiens
guuauguuuuuucuauauugaugcuguuucuuccaaagcaauugcuaugcuuuguaagaaucguuagucaaauauagauuuuuuugauuu

SEQ ID NO: 2235 - RNA, 200 nt, Homo sapiens
guguucuuuuuuccuucccuaauucuucaccucccccuccucugcugccuccuugcucuccucgcaggucaaguuuacccaugggggaacugguuccagccaaaccgcaccaaccuguggcagguaagaccuacguuccuccuuucaccaagcauugacagagaccugcuggaggcugggcacuguguuguuaggccgcg

SEQ ID NO: 2236 - RNA, 57 nt, Homo sapiens
aauuauugcucuaaaauuucuaauauuuauaguuagaacucuagguaagagaauucu

SEQ ID NO: 2237 - RNA, 65 nt, Homo sapiens
ucacaccuacaguggacuacccgauuuuucgcuucucuucagggaugagucaugugguggugaaa

SEQ ID NO: 2238 - RNA, 74 nt, Homo sapiens
ggcacuuaccgccagcucuuccacccugagcaacucaucacaggcaaggaagaugcugccaauaacuaugcccg

SEQ ID NO: 2239 - RNA, 99 nt, Homo sapiens
ucuggcuggauccuauaucccagcaggccugggcuccaccugccacaucccuguccuagggugaggccaggccucugcuugguugacacaucccagguu

SEQ ID NO: 2240 - RNA, 99 nt, Homo sapiens
uauucucucuuuuuuuucuuuaucagucuggcuaaagguuugucaauucuuuuuaucuuuucgaaaaacaaacuuuuaguuuugauaaucuuuuauauu

SEQ ID NO: 2241 - RNA, 81 nt, Homo sapiens
uuguaaugucuccuuuauuucuguuuuauuuauuuagaucgucccucuuuauuuaucagucuggcuaaagguuugucaauu

SEQ ID NO: 2242 - RNA, 63 nt, Homo sapiens
ucagucuggcuaaagguuugucaauuuuaucuuuucaaaaaccaacguuuuguuucauugauc

SEQ ID NO: 2243 - RNA, 68 nt, Homo sapiens
ucagucuggcuaaagguuugucaauuuuguuuaacuuuucaaaaaaacaacuuuuuguuucauugauc

SEQ ID NO: 2244 - RNA, 72 nt, Homo sapiens
ucagucuggcuaaagguuuguugauuuuguuuaucgucgcaaaaaaaaaaccaacuuuucauuucauugacu

SEQ ID NO: 2245 - RNA, 93 nt, Homo sapiens
cagccuccauuuuucuuagucagucuggcuaaagguuugucaauuuuguuuaacuuuucaaaaaaaaccuuuuuguuucauugauauuuugua

SEQ ID NO: 2246 - RNA, 77 nt, Homo sapiens
acgucuucuuuuucaucccugauuuuauuuauuuggguuuucucucuuuuuuuuucagucuggcuaaagguuuguca

SEQ ID NO: 2247 - RNA, 94 nt, Homo sapiens
uugucagucuggcuaaagguuugucaauuuuguuuaucuuuucagaaaaaccaauauuuugugucauugaucuuuuguuuucuuuguuucaauu

SEQ ID NO: 2248 - RNA, 144 nt, Homo sapiens
gcccgcugcuuuugcccacccucuuccucucuccuuacacccugcaggcguccacacaucucuaucaguuggaaccccagccugggccugugcuggaagcuggagccucaugggagccagccaggccugggagcaagcaggcuc

SEQ ID NO: 2249 - RNA, 108 nt, Homo sapiens
agccgccgcugccaaagcugccgccacuagccgggcauggccauggcguccccggccaucgggcagcgcccguacccgcuacuauuggaccccgagccgccgcgcuau

SEQ ID NO: 2250 - RNA, 107 nt, Homo sapiens
guggcuggggugccauugggauuuuggaaugggagcaguuugauuccucccucggaaggaacucauggcucucacaaaccagugucuguggcagugacaagucacag

SEQ ID NO: 2251 - RNA, 121 nt, Homo sapiens
cugcaccaccccuccuccuccuccgccuccuccugcugcugcugccgcaccuccuccccgcaggacuucaguaagcggcagcagcagcagcugagcagccagaagaggaaagaguucagcc

SEQ ID NO: 2252 - RNA, 87 nt, Homo sapiens
uggguuccgggagacccgcgggucuggcugcgagaggugagggcagagccggggcggggcccuagcggggugucccggcgacccaga

SEQ ID NO: 2253 - RNA, 77 nt, Homo sapiens
uggccugcauggcuccuacgugcugaggguggaggcugaaaggcugacucuccugaccgugggggcccagagucaga

SEQ ID NO: 2254 - RNA, 112 nt, Homo sapiens
uggcaugaucucggcucacugcaaccucugccucccaguuucaaguuauucucgugccucagccucccgaguagcuaggacuuacaggugcgugccaccacacccagcuaau

SEQ ID NO: 2255 - RNA, 86 nt, Homo sapiens
agcgauggcaugcuacuguuuaggccucauuuccccaaaaaacagcgagucccaggaagggcuugagcacagcuggccgugguuca

SEQ ID NO: 2256 - RNA, 67 nt, Homo sapiens
ccgugagcccgcagggcagcgucacaggcuugugcagcagccgugggcagccaagcaggucgcgggg

SEQ ID NO: 2257 - RNA, 99 nt, Homo sapiens
gccuuuagggaccugaggagccccgggaucagccaagccagacuucucuugugaucgggaaggcaacugaggcccaaggucacggugucagcaaggugu

SEQ ID NO: 2258 - RNA, 55 nt, Homo sapiens
ucgauuuacggccgcaggugcgcgcgcuuuuuugcucucgcugggaauggcggag

SEQ ID NO: 2259 - RNA, 104 nt, Homo sapiens
guggcucaaauuugcucccugucuucugacccuguauguguggugacccagaacguguuccucuucauauuagccagggagcuugcaggaagcagagcucaccc

SEQ ID NO: 2260 - RNA, 144 nt, Homo sapiens
uguucagucugaggaccucaagcuugggucaggccagcauguuuuagguauggauguggugacuuaaaguacuugauugucuugauuucacccugaaagcuuuggcaaaccaaguuucaacccuuacuuuaaaaaucugacacu

SEQ ID NO: 2261 - RNA, 91 nt, Homo sapiens
ugguacagaaggauuaaaugucacuugcucaaagucacauccugugaggggccaggauucaaacucagguggcccgauucagcucuccauc

SEQ ID NO: 2262 - RNA, 80 nt, Homo sapiens
ggccaaugggaggacaaaugccccucugaacugucuucugggcagugacagucauggucauaauccugacccugagccag

SEQ ID NO: 2263 - RNA, 138 nt, Homo sapiens
ccgggcgucagggugcauugugggaaggaggcggcagcgucucgggcgggcgggaggugcaccagcggcggcggcggcgguaaauccucccggccgcucacagcacuguggagccgcguccccagcccggccucggac

SEQ ID NO: 2264 - RNA, 64 nt, Homo sapiens
uucuagucugggagcagacagagaaaacaaaauuaagguuuuugaaugcuuuggauggagaaag

SEQ ID NO: 2265 - RNA, 103 nt, Homo sapiens
gccuauacaucuaguguugucuaguguugucauggcugcagucuuugcaguuuucagugcaucucauccauuugcugagcauacuucucugauguaaugguuu

SEQ ID NO: 2266 - RNA, 135 nt, Homo sapiens
gcauuuucauggagaaaugggcccuuucuguugaccaaugccagcugaaggaguugcaguuuucagugcaucucauccauuugcugagcauacuucucagauguaaugguuucaccaggauucagaaagcuguag

SEQ ID NO: 2267 - RNA, 122 nt, Homo sapiens
cccugauuuuuuucccccuauauucucauccuugcuugccuguuaggugggugugccugcugcuuuggacaugaugcugacugguagaagcauucgugcagacagggcaaagaaaaugggac

SEQ ID NO: 2268 - RNA, 68 nt, Homo sapiens
uggggcccagggaggauggggagggaguggcccaggccugccccuucgcuccugccugcauuuccaga

SEQ ID NO: 2269 - RNA, 68 nt, Homo sapiens
gcagaagaaggagcugucugacaucgcucaccgcaucguggcaccuggcaagggcauccuggcugcag

SEQ ID NO: 2270 - RNA, 56 nt, Homo sapiens
agcccgagccccggcaccgggcggucuguggccgcucucgggacuccccaggcuau

SEQ ID NO: 2271 - RNA, 121 nt, Homo sapiens
uccucggccgcgcaaugggcacccgcgacgacgaguacgacuaccucuuuaaaggugaggccaugggcucucgcacucuacacaguccucguucggggacccgggccacucccgguggacc

SEQ ID NO: 2272 - RNA, 74 nt, Homo sapiens
ggccccagaggggcaggaggggcuggcaaggcccguuccagacuuugcuaacccugccuucccacaggggcuuc

SEQ ID NO: 2273 - RNA, 61 nt, Homo sapiens
aguuucccuagcgggccauuccuuagcaaaauguuggaaucccuguugcuacauugacuaa

SEQ ID NO: 2274 - RNA, 112 nt, Homo sapiens
gaguauugauuggugguauugguuaugguucauuguccggagaguauauuguugaagaggauagcuauuagaaggauuauggaugcgguugcuugcgugaggaaauacuuga

SEQ ID NO: 2275 - RNA, 53 nt, Homo sapiens
uaacuaccuuucuuugcuccaagugaaguuuggacccagcagaaagcauuauu

SEQ ID NO: 2276 - RNA, 83 nt, Homo sapiens
uuuuuguaccaaaaauacuuaaagaccucagaagcacucuuuuacuuuuaagaaauugcuuuuuugaacuuuauucagaagca

SEQ ID NO: 2277 - RNA, 58 nt, Homo sapiens
agccaaggcccgcagccucuuugaugccaaccgagcugagcuguuugcccagagcugc

SEQ ID NO: 2278 - RNA, 56 nt, Homo sapiens
gauauucuuuuaacucauauguauugucaaguauuguugcuuugaaaugaagucuu

SEQ ID NO: 2279 - RNA, 104 nt, Homo sapiens
gccacuuaaauaagcuuauacuuugccaaagcugucaucuuguaauauaugcucuagaaaugacauaaagguuuauggggaagcaaagagagauuuuguggcaa

SEQ ID NO: 2280 - RNA, 140 nt, Homo sapiens
ggcgccucauggauuugcugcagaagaagauggucagccuagacaucugucgcuaccuggcccuggacgaggcugaccgcaugaucgacaugggcuucgagggugacauccguaccaucuucuccuacuucaaggugccg

SEQ ID NO: 2281 - RNA, 61 nt, Homo sapiens
cuagaccucaucacaacagagacaaggucugaugaugcucuguguggccuugaugcuggcu

SEQ ID NO: 2282 - RNA, 132 nt, Homo sapiens
ugagacuugccaguucccacaggccaagccaggcgucugcaccccauucucuugguuccgacggugugucucugcgauguuuuggcggucucuccucuccauccccuuaauaauacuggucucuguuucacc

SEQ ID NO: 2283 - RNA, 60 nt, Homo sapiens
gaugagugcgcaguaugaggaccgcuggccgggacccagugagcgcgggacuacaauucc

SEQ ID NO: 2284 - RNA, 72 nt, Homo sapiens
ucugcccccuguggcugcaccugguccuccguaccaaccccuggggguauccacaaccacuugggacagaag

SEQ ID NO: 2285 - RNA, 111 nt, Homo sapiens
cccagggguguccacaaccacuugggacagaggugaagguggaauuucaaagagaagcuuccuuggaucuucggugccaagcuuggaugagcuacagccccaacaugggcc

SEQ ID NO: 2286 - RNA, 112 nt, Homo sapiens
cccagggguguccacaaccacuugggacagaaggugaaaguggaauuucaaagagaagcuugcuuggaucuucggugacaggcuuggaugaguuacggcaccaagcugggcc

SEQ ID NO: 2287 - RNA, 108 nt, Homo sapiens
ucuguuccguguaacuggaaaugugcucugaacuugucugucucccuuggcugcuccuggcccuuguuacuggcugucagggauguccacaaccacuugggacagaag

SEQ ID NO: 2288 - RNA, 67 nt, Homo sapiens
uaccagaggcugggauggguagugcaagaguacaaggggcuauagucaauaauaaucuaaugguaca

SEQ ID NO: 2289 - RNA, 53 nt, Homo sapiens
auuacuguggagaaugccuuuucgcuauucucugcugcagucagauaugaugc

SEQ ID NO: 2290 - RNA, 53 nt, Homo sapiens
ucugcucagcaucuggugagggccuucuuugcaucuuuguaacauggcagaag

SEQ ID NO: 2291 - RNA, 91 nt, Homo sapiens
aagaaauuuauuuggcucacaguucuggaggcugggaaguccacaggcauggugccggcaucugcucagcaucuggugagggccuucuugc

SEQ ID NO: 2292 - RNA, 104 nt, Homo sapiens
auacaggagaaauguauuuggcucacagaucuggaggcugggaaguccaagggcguagugcuggcuucuacucagcaucuggugagggccuucuugcuguguca

SEQ ID NO: 2293 - RNA, 77 nt, Homo sapiens
cacaguuucagaggcugggaaguucaagaucaagaugccagcagacucagcaucuggugagggcucuccgcugugua

SEQ ID NO: 2294 - RNA, 90 nt, Homo sapiens
gcaucugcucagcaucuggugagggccuucuugcuacaucauaauauggcagagggcgucauauaaccagaaggcaagaaugggauguca

SEQ ID NO: 2295 - RNA, 80 nt, Homo sapiens
auucaaugucauccugggcuacauguggccugauagcuucagguugaacaaguuugucuuauuaucauuauauugaauua

SEQ ID NO: 2296 - RNA, 96 nt, Homo sapiens
uacuguauuccaaacauuuucaucucuggaaauuuuuaguuuucuaacaccuuuggaaaaugcugagucagaaucacuaagaugauguucaguaua

SEQ ID NO: 2297 - RNA, 75 nt, Homo sapiens
uguuacauggguuacuguuauuguuuuaggccugaucuguuuagaaaggaaagagaaaugaaggaaauagauaga

SEQ ID NO: 2298 - RNA, 61 nt, Homo sapiens
uuggcaguuggcugcuaaucuuaugaacaguggugugagacugaaugccauuuguccaggc

SEQ ID NO: 2299 - RNA, 58 nt, Homo sapiens
gguugagcagucuuuucuucuacucuccaauuuacagggaaaugcugcaaagaauuuc

SEQ ID NO: 2300 - RNA, 97 nt, Homo sapiens
gcccgcggaaggagugcgcaggcgcggaaucuccgacuugccauggucgucuuugucugccggugaguuggguuucggcccugugggacuuggguuu

SEQ ID NO: 2301 - RNA, 71 nt, Homo sapiens
acugcaggcugguuuuaggucuugaauuauguaagaaucuugcacagcacugcuaauguaaauuucaguug

SEQ ID NO: 2302 - RNA, 92 nt, Homo sapiens
agaagacuagaaccuccacugcaggcugguuugaggucgugauuuaugucagaaucuugcacagcacugcuaauguaaauuucagcuuuuuc

SEQ ID NO: 2303 - RNA, 93 nt, Homo sapiens
cacauggacaucgaggcgcugaaaaaacucaacaagaauaaaaaacuggucaagaagcugggugaguccggccgcugugguuuugcaugugag

SEQ ID NO: 2304 - RNA, 74 nt, Homo sapiens
uugcaucauaccugguggaaguuuuuguaucuuuaagaguaaguccgcaauguugccagugucugucugcagau

SEQ ID NO: 2305 - RNA, 69 nt, Homo sapiens
agcuggaggacuuccgcgacuaccggcgugugcacaagccgcccaaggugcaggagaagugccagcugg

SEQ ID NO: 2306 - RNA, 76 nt, Homo sapiens
uguuugcagugggugccacccacagugccagcauccaggaggaaacugaggagguggugaacucacaguaagcacc

SEQ ID NO: 2307 - RNA, 86 nt, Homo sapiens
uacaauauuuuuguuggucuaaaauuuguacaguuaauuuuuucuuaaaaaaugcucauugaaaauaauuaauaaaaauagguaau

SEQ ID NO: 2308 - RNA, 122 nt, Homo sapiens
gaaauagcauguauguguugcuuugugauguauccucaguauccaucagcuuucaaguuaaaagcucauucaaguuaauauugauucagaaucuuuggcaaagaaucaccagugcauuuuuu

SEQ ID NO: 2309 - RNA, 87 nt, Homo sapiens
agaguguguaaugagccauccaacaaccacuguggauguguccagacugucucaaaggcuguuggauauuugcuggguccgcucugg

SEQ ID NO: 2310 - RNA, 53 nt, Homo sapiens
aaacccagggaacugaaacaaauuacuuaauuuuucaguuucuggaaauuuag

SEQ ID NO: 2311 - RNA, 103 nt, Homo sapiens
uucaacaacugccuaugauucuuuuuacucauuuccccaggaaauacauuguucucucugggauagcucugagucaagucaaauaaggauagcauugugaguu

SEQ ID NO: 2312 - RNA, 123 nt, Homo sapiens
agaucaaguugauugaauguuguuuaggucaacuacaucuuuauugguuuucuaccuguuugaucugucaauuacugagaaagaaauguugaagucuccauauaauaauagugaauuugucua

SEQ ID NO: 2313 - RNA, 99 nt, Homo sapiens
gagucccucucccagaugcuguccaugggcuucucugaugaaggcggcuggcucaccaggcuccugcagaccaagaacuaugacaucggagcggcucug

SEQ ID NO: 2314 - RNA, 58 nt, Homo sapiens
uguuugagcugauguguggggaacugcuuuuggauuacuuauggguugcugaaauaua

SEQ ID NO: 2315 - RNA, 77 nt, Homo sapiens
agugaagugaaagugaaaggcagaauugaaaguguuaaggcagacauggcaacuuccugucucuucuacagaacucc

SEQ ID NO: 2316 - RNA, 96 nt, Homo sapiens
aaccuguguauggugacuggaggugcuaaccuguguaugaagaauuggugugaucaccaacagagagaggcacccuggaucuuuugacgugguuca

SEQ ID NO: 2317 - RNA, 55 nt, Homo sapiens
gauucgcuguaggacuuuggucgagcggcagugcuucccugagccucagcguugc

SEQ ID NO: 2318 - RNA, 68 nt, Homo sapiens
agcaguuaguccuuccuccccugcccucagccagaugcucagcaaggaggccuggauguggcggcucc

SEQ ID NO: 2319 - RNA, 96 nt, Homo sapiens
ccaugcagauuaccaguugaccagugcagagcucuccuccuuaccagccuuuaguucaccuggggggcugucgcuaggcaaugucacugccuggca

SEQ ID NO: 2320 - RNA, 59 nt, Homo sapiens
ggauccugaugcuucaaaaccggaagacugggaugagcgggccaagaucgaugauccca

SEQ ID NO: 2321 - RNA, 117 nt, Homo sapiens
ugucggaagcuuugugucuauugggaugaucaugugaguuugcccuuuauucuauucuauccuaugaauguggugcauuacauugauuuucuuacauugaaccaauugugggacaaa

SEQ ID NO: 2322 - RNA, 136 nt, Homo sapiens
ccugcaacucugucucccacaggaaauguucaucaugcucaccauccuugccuuucguguuuuccuugagaccacuggggaagagaccucagugagcagaaugcacagccauggggcagaggucugagugugggga

SEQ ID NO: 2323 - RNA, 68 nt, Homo sapiens
caggcacuuuuaauucucagugucuauugcauaauggucaccagaugggcuauggaguugagccuggg

SEQ ID NO: 2324 - RNA, 67 nt, Homo sapiens
ucugaaauuaaacuuucucuuuucucucggcuuuucuaaaaagaguuaaugguuuaauaauuagauu

SEQ ID NO: 2325 - RNA, 119 nt, Homo sapiens
cuggguccaauuaggagagaugguuugucauuucaucuauuaaacuuucucuuuucaaacuacugucugaaaauagaaacuuuaauagaagaaauuacuaacuauaacaagacuuagcu

SEQ ID NO: 2326 - RNA, 64 nt, Homo sapiens
ugucauuccagagugcugaggccagggcugauggucuuaaaugcucauuuucugguuuggcaug

SEQ ID NO: 2327 - RNA, 63 nt, Homo sapiens
auucagagcuuugggaugucaggaauuaacccccagugggcaucacucaucaaguauuaauua

SEQ ID NO: 2328 - RNA, 54 nt, Homo sapiens
ggucagcaccucuagugaccacccaggcuggggucccuguggggcacuugcccc

SEQ ID NO: 2329 - RNA, 98 nt, Homo sapiens
agcgagugcauucuguucucugcagcuugggaagaaugagccuuaaaaacacacuggucacugcccauagcagcccugggcaguggguacugagcucu

SEQ ID NO: 2330 - RNA, 139 nt, Homo sapiens
uaauagcgccggccuucggcgaugucacagugacgcuacagugccuggagcugggcuguuuucuccucgguuuggagccuggugaccgugacuuccccgccauguucuguguguugcuggcuggagaaggguaguugac

SEQ ID NO: 2331 - RNA, 87 nt, Homo sapiens
gccccgccccggcgaccucaggcgggcggggaagaccgagucuucccggagccgcuucguccgcccggcgccggagucccacggccg

SEQ ID NO: 2332 - RNA, 57 nt, Homo sapiens
cccgcugcuaggguguaguuaguccgaggccggaccaaaacugcagagacaugggug

SEQ ID NO: 2333 - RNA, 74 nt, Homo sapiens
aguuucucaacucugugauguggcuucugaugugagggaacuuggagcuaaauaaaauaaguaugugucacuca

SEQ ID NO: 2334 - RNA, 108 nt, Homo sapiens
aggggccagagucacugacggugcaggagggucugugcguccucguacccugcagauugcccacuacccuuccagccucguacuaugguuauggcuacugguuccugg

SEQ ID NO: 2335 - RNA, 90 nt, Homo sapiens
gggcagccugccugcuccugccucugagcccauccucuucuuccaggaguccagcccagaguggccacagcagacguguaggccucccug

SEQ ID NO: 2336 - RNA, 52 nt, Homo sapiens
ugcaguaccugcccaguggugaccggccccuucucuuccuggcaggcgcaca

SEQ ID NO: 2337 - RNA, 85 nt, Homo sapiens
gcuugcguccagaaccagcugcuaggcccugaugagaacgcuaagaccuacaucgccagccaggguugucuggaggccacgguca

SEQ ID NO: 2338 - RNA, 76 nt, Homo sapiens
agaggaggacgugggugucccugagcugaugugaaccuugccucaacuccuuggcuuucucccaguccuucucuuc

SEQ ID NO: 2339 - RNA, 105 nt, Homo sapiens
gcugacggagccgggcucaccaggucgcugccgcgagggaguugcugugcuggggccuggguggcggcuggaggccugaguugggcucgcggcgggggucggcag

SEQ ID NO: 2340 - RNA, 93 nt, Homo sapiens
ggcugcaggagggcuggggaagccagacucaguccccuagaccugggagcugggcuccuugcccauccagcagccauuccccacugcagccca

SEQ ID NO: 2341 - RNA, 65 nt, Homo sapiens
ucugaauuucugguccuaagcauuuuggauaagugauacucaacagcauuggagucaggcagaug

SEQ ID NO: 2342 - RNA, 117 nt, Homo sapiens
gccgccgccauuuugagagcgagccgagccgagcugccgggcgccgcguccgcugccggagccccgacgacgacgccgaggaggcggaggccgcggcucucggaacgcggccggccc

SEQ ID NO: 2343 - RNA, 63 nt, Homo sapiens
gccgccuccugcugcuccggggcccccaagauggcgggcccgggcggcggcgcgaggaggcca

SEQ ID NO: 2344 - RNA, 63 nt, Homo sapiens
gccgccuccugcugccccggggcccccaagauggcgggcccgggcggcggcgcgaggaggcca

SEQ ID NO: 2345 - RNA, 60 nt, Homo sapiens
aggccggguguaacagggucaucucagucaucacugugacucagcauccucaaagcuucu

SEQ ID NO: 2346 - RNA, 141 nt, Homo sapiens
uguguggaaguuugcaucugagagugcgagagcuggacggaguguuacagagccgcgaugccuucucguuuuguuuuguuuuguuuuugauacagugucucgcucuuccgcccagucucgagugcaguggugagaacacgg

SEQ ID NO: 2347 - RNA, 74 nt, Homo sapiens
ugucuucagcaaaaauaccguggggucaguuuagccagaauccuccuuacccuugauguuuccucuuagauaau

SEQ ID NO: 2348 - RNA, 100 nt, Homo sapiens
uccuuuuuuuuuuucuucauccaggcagagaggccuacugggacuuaaauccaaggagcugaaaucuguuuugggaugggguggagucacauucuggaac

SEQ ID NO: 2349 - RNA, 126 nt, Homo sapiens
uuuguagcuguccugcaggugccggagacaucuauagggucugguggugauaaauugaugcuaacacugguugguugguaccagcccacccugaagcucugcccucuuaagcagcaguuagaaacu

SEQ ID NO: 2350 - RNA, 82 nt, Homo sapiens
ugcauuuuuuucccuccagcauuucaaagacauuacucaaauuuuguuuguucuuugugcugcaguggucuuacuuggcaac

SEQ ID NO: 2351 - RNA, 56 nt, Homo sapiens
gcgacuuggugaaaacaggaaucaaaacuugggccuauuucuccugaggucugcuu

SEQ ID NO: 2352 - RNA, 80 nt, Homo sapiens
gacuuucucauagaauguucuugaaaggugauuggcaaagucaugcaggcccgccuuaaagcgcugauuagaacagucca

SEQ ID NO: 2353 - RNA, 115 nt, Homo sapiens
uccugaucaugugcucagcccuagcuuuagaagauggugcuauccaaacuccaugaaugaacagugaaggaaggaccauuguucaaaaguaaguggaaaugcuguuuccaggaaa

SEQ ID NO: 2354 - RNA, 115 nt, Homo sapiens
uccugaucaugugcucagcucuagcuuuagaagauggugcuauccaaacuccaugaaugaacagugaaggaaggaccauuguucaaaaguaaguggaaaugcuguuuccaggaaa

SEQ ID NO: 2355 - RNA, 93 nt, Homo sapiens
uuuuuuuuuuuuauuuagagacggggucuuucuacauugcucaggcuagucuugaacuucuaggcucaaauuucuugauuucuuccaaaagua

SEQ ID NO: 2356 - RNA, 93 nt, Homo sapiens
ccuugucuuucuccaccuuucgucuuuggucacagcgccaucucaugguuagcugaaacuuugaaagaggauucauucuucagaggcaaggaa

SEQ ID NO: 2357 - RNA, 57 nt, Homo sapiens
guucuggcucaagggcuaugaacagaaaugauauugggcacucuugggccaaagcau

SEQ ID NO: 2358 - RNA, 138 nt, Homo sapiens
ucuugguugccugucacuguuucuuccugcaucccgugggguuucuucgcucucgucaccuucugggagaagaacccuggggaagaagccaaaugcggauggacagcaggauacacaauucucuagugcucucaggga

SEQ ID NO: 2359 - RNA, 55 nt, Homo sapiens
agcucaggaugagagagugagaagggaaggggcuugccucuaauccugaugcuau

SEQ ID NO: 2360 - RNA, 66 nt, Homo sapiens
ugcuggccauuagcgcgacuugggguuauucaguacacuucuuguuugcagauggugaagagcgcu

SEQ ID NO: 2361 - RNA, 52 nt, Homo sapiens
uguguauauauguaucauuuguauauaaacaaauuuuauguguguauauaau

SEQ ID NO: 2362 - RNA, 73 nt, Homo sapiens
uuggaaaucaaguucuugagcacuuuugaaaacagacuaauccaaaacaucugcaagaauuuuaucuuuaaaa

SEQ ID NO: 2363 - RNA, 93 nt, Homo sapiens
gugcuucccaaacugggguuucccagaacacuuuuucuaagagagguuaauagguaggcuguucucacgguuaaauuaguuugggaaacaugc

SEQ ID NO: 2364 - RNA, 76 nt, Homo sapiens
ugacugccuuguccuuaaccagggcuaucucucagaagcaggggccagccugguggaccaaaaacuggaacucaac

SEQ ID NO: 2365 - RNA, 95 nt, Homo sapiens
uuccuaacaccaaugacccaugugcagauaacuaucggggcucugcaccagaguccgagaaagagacgaaagcugucacuaauuucauuagaagc

SEQ ID NO: 2366 - RNA, 97 nt, Homo sapiens
guccaguagaaggcuauuuaauuuucacaacugcuugaauuuugacauacaagaugaagcaagaugccucaagaaaugcugccuacacuguggauug

SEQ ID NO: 2367 - RNA, 67 nt, Homo sapiens
gccacuacaaacaagcaacugugggcgacauaaauacagguaugcagagcggggguuggaagggcau

SEQ ID NO: 2368 - RNA, 76 nt, Homo sapiens
cuuggugauuuaaaacaauauguuuauuuucuuccaguuuuauagaacagaaaucucauguagcucucacugagag

SEQ ID NO: 2369 - RNA, 83 nt, Homo sapiens
agccuggagaccagggcuggagcuugaaggucacacugaagucauggacuagaguuucaagucaaacuagggauucaugcuac

SEQ ID NO: 2370 - RNA, 65 nt, Homo sapiens
uggcacaucucaccaggagcucccccgagucacccccaccagggcuggagcuugagcucgucacu

SEQ ID NO: 2371 - RNA, 64 nt, Homo sapiens
ugcagggccaaccuaacggucucugaugauauuaacaggcuggaccagggcuggagcuugcagc

SEQ ID NO: 2372 - RNA, 56 nt, Homo sapiens
uauuuuucaaacugaguguuuuagaagccaagguauagaaaccagugagaggugaa

SEQ ID NO: 2373 - RNA, 97 nt, Homo sapiens
uugaagcagguguacaguguaaagcugcccuggaugagcaguuugaaccucagaagacucuguucauccagugcgauguggcugaccagcaacaacu

SEQ ID NO: 2374 - RNA, 68 nt, Homo sapiens
gcugcugagcuucgugcuuaucugaaaucuaaaggagcugagauuucagaagagaacucggaaggugg

SEQ ID NO: 2375 - RNA, 57 nt, Homo sapiens
cagcagaggcucaucuuugcaggcaagcagcuggaagauggccgcacucuuucugac

SEQ ID NO: 2376 - RNA, 54 nt, Homo sapiens
gaccagcagaggcucaucuuugcaggcaagcagcuggaagauggccgcagucuu

SEQ ID NO: 2377 - RNA, 67 nt, Homo sapiens
cagccccgaccagcagaggcucaucuuugcaggcaagcagcuggaagauggccgcacucuuucugac

SEQ ID NO: 2378 - RNA, 112 nt, Homo sapiens
acuaugcugggcacuuugugauaucauuuaacccucccgcaaaaagcaucauucucuuuugacagaugagguagcugaaguucaaagggguaaugccacuuguccaggguca

SEQ ID NO: 2379 - RNA, 97 nt, Homo sapiens
agcucugguauuauggagaacauuuguuuaugcuacauggaaaaucucuaacugugauuccauacaagugugaagugucaucauuagcaggugcucu

SEQ ID NO: 2380 - RNA, 65 nt, Homo sapiens
guuucuccucugauuuuugagaauguaaaucagcaaguuccuuucauucuuucugggauaaaucu

SEQ ID NO: 2381 - RNA, 70 nt, Homo sapiens
aaccuggaagguaugacuaugucugugaauccucauuggaagaaguuuuauuggucagacauccuguucc

SEQ ID NO: 2382 - RNA, 70 nt, Homo sapiens
agccuggaagguaugacuaugucugugaauccuuauuggaagaaguuuuauuggucagacauccuguucc

SEQ ID NO: 2383 - RNA, 122 nt, Homo sapiens
gcuuauaaaucagaacaugugguauuugauuucuugguccuacaucaauuagcuuagaauaauggccuccagcugcacugauguugcuacgaaauacaugaauucauucuuuuuuauaguug

SEQ ID NO: 2384 - RNA, 140 nt, Homo sapiens
guguuuaucucccgcuuauaaaucagaacaugugguauuugguuucuugguccuacaucaauuagcuuagaauaauggccuccagcugcacugauguugcuacgaaauacaugaauucauucuuuuuuauaguugcauag

SEQ ID NO: 2385 - RNA, 81 nt, Homo sapiens
cuugagcugguucagcagcgucguggcagggcaggacaggacccugccaggcccugugcacccucuccacagcuucaggca

SEQ ID NO: 2386 - RNA, 97 nt, Homo sapiens
gccgcccgcggcggcgggagaagacgccgcggggcgcgggguuauguaaugguccccccuaggcgucgacgccggcccggcugcuggaccgcggugg

SEQ ID NO: 2387 - RNA, 105 nt, Homo sapiens
ugaauagcuacucuuauuuccauuauuaaaaucagguagauggcagcagaaucuggaggagauucacccucuguugaccaucuucuguaaggugcacuucucagu

SEQ ID NO: 2388 - RNA, 131 nt, Homo sapiens
ggcaggcagugguccugguucggauauuuggcugaaaacacagcuccucuuugucacccucaggaagccaucccaaaccgcucgaggaguccuugaagccaguguuaccacuaggacagcaaguuugccug

SEQ ID NO: 2389 - RNA, 131 nt, Homo sapiens
ggcaggcagugguccugguucggauauuuggcugaaaacacagcuccucuuugucacccucaggaagccaucccaaaccgcucgaggaguccuugaagccaauguuaccacuaggacagcaaguuugccug

SEQ ID NO: 2390 - RNA, 63 nt, Homo sapiens
gcuugaagugucaggagccacacuggagacccggugugaccucucacacuagaacuuaggcag

SEQ ID NO: 2391 - RNA, 117 nt, Homo sapiens
gaggagggcaaggcgaagcugagaguccccucuagccuugcugagauaugaugccaggguuuccuacgaagacaggccaagcuauagaggcuucagcuucaccuauaaacuguucau

SEQ ID NO: 2392 - RNA, 121 nt, Homo sapiens
uagaaaauugugaauguaacaugucuuucuaaguaggacugcuaaaauaugucauuggccuuguucuguuuaaaaaacuaaaacauguuuauuugacccauaauagagaaaauauucuaaa

SEQ ID NO: 2393 - RNA, 61 nt, Homo sapiens
gaaugauaauaacuuccugccuucuggucuugauuccuuaugguaguauuguacaguucca

SEQ ID NO: 2394 - RNA, 116 nt, Homo sapiens
cuggucccuguucaacacacucuucaucaauugcugcuuccugagacuugucacauaaaauuaacccaugaagucuagggaccaaaagauggcaggccaugugacugggcccagac

SEQ ID NO: 2395 - RNA, 108 nt, Homo sapiens
ugacacuuggccuacugggcaaaccaucaauacuaaagcuauaaacaugaccuuuauuaaacagcuagaaaagauugugaaaugugcagauaaaccagagacgucaau

SEQ ID NO: 2396 - RNA, 97 nt, Homo sapiens
cugcacguguuuguucugggcgaauggcagcccaucgagguacgacuaagaggaugguguugaccuaggaaguguuuguccugggcgaauggcagac

SEQ ID NO: 2397 - RNA, 60 nt, Homo sapiens
uuuaacaaucaaugccugugagccaguaugaaggggugcagcauaccgcugacuuaggcc

SEQ ID NO: 2398 - RNA, 92 nt, Homo sapiens
caaaguacuuacaauguucuggcacauaguaauuaauuaagaaaaucgagcacccuuaauuaccuagaaugcaggguuguuaguuuuuuggu

SEQ ID NO: 2399 - RNA, 55 nt, Homo sapiens
caccccauaaacaccaauucuucuaucuuguucaggaaauggugauuauggugca

SEQ ID NO: 2400 - RNA, 113 nt, Homo sapiens
guccagggcgugggggggccgguuuguuguggucgccauuuugcugguugcauuacuggguaaucggggcccuggcuugccgcguccgccggauacccucagccagugggcag

SEQ ID NO: 2401 - RNA, 53 nt, Homo sapiens
uugagagacugagcuauaaaguaaauagcuuuauaguguugucucauuuaaga

SEQ ID NO: 2402 - RNA, 68 nt, Homo sapiens
uuuguacauuaucuucucaucuaauaccucaaugaaaaggcccuggagagaauaaaggaaaucaaaag

SEQ ID NO: 2403 - RNA, 66 nt, Homo sapiens
ggcagguccucucauggaguguucaguucucagcagagaggaggcccuggagagaauggcugcucu

SEQ ID NO: 2404 - RNA, 86 nt, Homo sapiens
gcaggucccacucccuccagaggcccuggagagaaucuaucuuugucuccugguggcugcugagauuccuugguuuguggcugcau

SEQ ID NO: 2405 - RNA, 104 nt, Homo sapiens
gcagagguuggugaggcccuggagagaaugaggaaaacaggggaggcauuugcugagaccuggggucacuucgugaagcuggggccuggaggaaagggcugcgg

SEQ ID NO: 2406 - RNA, 179 nt, Homo sapiens
cagccugcucuccauccgaggccccauuucuguacugaggccuccagagcugagcaagaccaaaggcccuggagagaaugaagcuccguagcaucaucuccagguccucuggugcuccccucccugaggugucacaaaggcccaugguacaagaaagcacuuccaaugcagagugcugc

SEQ ID NO: 2407 - RNA, 52 nt, Homo sapiens
uuucaggcccuggagagaaucuuacauuccugucuauuugguuauagaaaag

SEQ ID NO: 2408 - RNA, 59 nt, Homo sapiens
uguuaucaucuggcucaguuugugucucuguggaaacuggggcccaagaaaaugauaca

SEQ ID NO: 2409 - RNA, 141 nt, Homo sapiens
auacauacuauuaaauguguauaggccuuccaucaucuggcucaguuuaaucuaccauuaguaucccauugaaauguucagcuguagcagaagaugccaugcuauuuuauaucuuuacacauaacuaaauuuuuuguauga

SEQ ID NO: 2410 - RNA, 97 nt, Homo sapiens
aguuugccaaccugcuaggagccagauccuggccuuuguguuucucugccaucgugguccacaucuguuaucaucuggcucaguuugugcuuauuag

SEQ ID NO: 2411 - RNA, 56 nt, Homo sapiens
cugcguccacugcccaggcgacgcaagcuacagcggcgucaacgccugggucggcg

SEQ ID NO: 2412 - RNA, 61 nt, Homo sapiens
ucacacuggagcagcuggcacagcuggggacguuuagagcagcgugcugacagugcuggag

SEQ ID NO: 2413 - RNA, 56 nt, Homo sapiens
guuuuuuccuaugagcacagcuccucuccagcgugcugacagugacacuuaaaccc

SEQ ID NO: 2414 - RNA, 105 nt, Homo sapiens
gggcucagagcagcuccccucacccucgcccucucuccgccaggccaccagcagcggcgggggcuggcccaugaauguguggcugacucccaaccuccagcccuu

SEQ ID NO: 2415 - RNA, 57 nt, Homo sapiens
uccuaagcuggaugcaaagaaggugucacagagccagcucggcaggcagcaaggagg

SEQ ID NO: 2416 - RNA, 76 nt, Homo sapiens
gcuggggacccagcuugugcccuggcgucguggccgccggcaggcagcaaggaaggggguguaaagagcccgguua

SEQ ID NO: 2417 - RNA, 80 nt, Homo sapiens
ggcccgccgcggcgcccaggcggcaggcagcaaggacagccuugugcgagcccgaucugggccuuccugggcgcggcuac

SEQ ID NO: 2418 - RNA, 65 nt, Homo sapiens
gcagaugcaauaacggugguucuguauggcaaacucccuuccaugcaugaugcuggcuccugugc

SEQ ID NO: 2419 - RNA, 142 nt, Homo sapiens
guuuuccuccccuugggggauuguguugagugggaggcaacgggaaugcaggcuguaucugcagggcauugugcuaacaggugcaggcugcagaccugucacaggccgcugagaccagguucccuacuguggcugaugauca

SEQ ID NO: 2420 - RNA, 96 nt, Homo sapiens
gguaugugcucauaguccuagccacugaggaggcugauacgggaggauugcuucagcccaggaaguaaagguugcagugaggugagaucauacccc

SEQ ID NO: 2421 - RNA, 69 nt, Homo sapiens
gcaccuguuccuagucaugcccagggaauaugugaaacucuggcucaggaugaacgucuguugguguca

SEQ ID NO: 2422 - RNA, 54 nt, Homo sapiens
guuagucagucugggaguccuggccguucguguggccuggcucaggaugaacaa

SEQ ID NO: 2423 - RNA, 68 nt, Homo sapiens
gugcauucaacugccuguggacuagcagaaacuacugguggagucaggggcucugcagcagugcacac

SEQ ID NO: 2424 - RNA, 121 nt, Homo sapiens
gguuuccacccaacuuuacaaucugucaaggcugcuuugaaucugcuucagucacccauuguguuggagcucccucccagccagcagccaucugcagggugaagauggcuuccucuaccuc

SEQ ID NO: 2425 - RNA, 60 nt, Homo sapiens
ucaguacugaggcuauugaaccaacaggcaaaauucugucaaggcugcuuuaaaauggca

SEQ ID NO: 2426 - RNA, 87 nt, Homo sapiens
ggcccuuguggagagcauccugugccagccucgcccccucccaguguucuggggccccucugucaaggcugcuuucuccaaggcuga

SEQ ID NO: 2427 - RNA, 63 nt, Homo sapiens
cauguuuucaacugucaaggcugcuuuuagaauccagaggaggccuguaaguacaaagaugua

SEQ ID NO: 2428 - RNA, 81 nt, Homo sapiens
ugaaacugugggcuugggagcucucaaauuauuauuauuauuauuauuguuauuuuuacucccaauggaauauuguucaau

SEQ ID NO: 2429 - RNA, 73 nt, Homo sapiens
uccagcucuggaguuggaacuuggcauuaaaaguauuuauaacgugugugaguagaaacugugggcuuggaaa

SEQ ID NO: 2430 - RNA, 98 nt, Homo sapiens
uauucuuaacacaaguguccacaucaggcaguauagauucaaggaccauggcugggcagaaacugugggcuuggugaaggaugcacaggaggagugug

SEQ ID NO: 2431 - RNA, 96 nt, Homo sapiens
acccuuucagaguggugcuccaggggcaaaggagauuaggagaaacuggcacagucuugcgucaugaucuggcauugugucauuuggauuuggugg

SEQ ID NO: 2432 - RNA, 71 nt, Homo sapiens
gccgaucgggcgcgguacucagccuuuuaaagcuugaggugagaggggugggguguucccucuucugguuu

SEQ ID NO: 2433 - RNA, 66 nt, Homo sapiens
cuggagaaauagguuugccuggguuaugcuacacggucaagacugccagccacuguucauucaggu

SEQ ID NO: 2434 - RNA, 66 nt, Homo sapiens
ggucaagacugccagccuuuggagaggaacuaccccaucagcucuccugggucucuaguuggccaa

SEQ ID NO: 2435 - RNA, 89 nt, Homo sapiens
aggcauaccucuguuacacuucccagaacagccucgaguaguucugagaguugcuucgugguagaguggugucacucagguguucuuuu

SEQ ID NO: 2436 - RNA, 54 nt, Homo sapiens
ucacuggcuucugagacagccucaggaugggugugcuguugacaggugguggcg

SEQ ID NO: 2437 - RNA, 53 nt, Homo sapiens
ugucugggugugcuugugauccccuagccuggcuucugagacagcagugcagc

SEQ ID NO: 2438 - RNA, 62 nt, Homo sapiens
cuuugcacaugacaucaacucuuucuccaggcauagagaagaaggggaguuaauguagagau

SEQ ID NO: 2439 - RNA, 82 nt, Homo sapiens
gcaggaucagggucgcggccugggaagcaggguugguccaggcuugggcuccuccgcgucccccgacccccaaccccugccc

SEQ ID NO: 2440 - RNA, 70 nt, Homo sapiens
aggucggccuguuccuuuucagcagcagacaugggagggcccagccugagcgcugagugcgagcuccuuc

SEQ ID NO: 2441 - RNA, 90 nt, Homo sapiens
augucauggugaagugguuguguugugauguggugacgucguggugauguguuguuguuauggugagguggugaugucauagugacguga

SEQ ID NO: 2442 - RNA, 58 nt, Homo sapiens
gugauguggugacgucguggugaugugguguuguuauggugagguagugaugucauag

SEQ ID NO: 2443 - RNA, 82 nt, Homo sapiens
cgugauguggugguauaguggugaugucauggugacgucguggugauguggugacgucguggugauguggugaugucacggu

SEQ ID NO: 2444 - RNA, 57 nt, Homo sapiens
uauuguuagauggaguauguucucuucccaccuaauucauaccccaucugaaaugcu

SEQ ID NO: 2445 - RNA, 141 nt, Homo sapiens
acuuauaauccuauuauuuaauucuuuccagcugcugacauauaguacauaauuucagauguuuuaguauguuugaugaauauuucuuuuuuuuucaauuuaccccaucugaaauuacuucauagucuuuccagcuagucu

SEQ ID NO: 2446 - RNA, 102 nt, Homo sapiens
gccuauaauaggaucuaucuuagagaguguuccauaugcuaaugagaaaaauguauauucugcaguucuugggucgaacauucuguaaauuuuguuagguac

SEQ ID NO: 2447 - RNA, 54 nt, Homo sapiens
uuaaaacauccuugccucagagggacaaaucccauuugaacauggcaaguaauc

SEQ ID NO: 2448 - RNA, 60 nt, Homo sapiens
gauaggaacauguaacuauuuuuuguuuccauuaaacaacaauuaccugauuuauauuca

SEQ ID NO: 2449 - RNA, 71 nt, Homo sapiens
acgaugggcauaaaacugugguuugcuccacagauuucugagcauuggccguaguauaccccuggucgugu

SEQ ID NO: 2450 - RNA, 87 nt, Homo sapiens
uguuucuuguagcuuuugcuuugauuggaauaauuuuacucuaggaauaaaguugugucaucugcaaaaaugaaucauauguacaca

SEQ ID NO: 2451 - RNA, 138 nt, Homo sapiens
gauauguaucuuuuuuaaauguuucauucaggguaagcaaaugagcaacagcaagggaaaaucacauuuuaguauuuuucucccuguuaaagaucguuuugugcuuuuuaacuaggauaccagaaagcaaaguauuuc

SEQ ID NO: 2452 - RNA, 74 nt, Homo sapiens
aagcaaaugagcaacagcaagggaaaaacacauuuuaguauuuuucucccuguuagacauugcuuggugcuuuu

SEQ ID NO: 2453 - RNA, 157 nt, Homo sapiens
gucucaaaaaaaaaauaaguaaaagccugcuucugacuauuagguuggugcaaauguaauugcgguuuuugcuaucacuuuuaauggcaaaaaccacaauuacauuugaccaaccuaauauccuaaagaacaaagcugccauaccuguccaugacug

SEQ ID NO: 2454 - RNA, 117 nt, Homo sapiens
acaaccagccucagggcuguaauacguucuaaucacugaaaaauacuaaugcauaucucuacuccucagucuucuauuagguuggugcaaauguaauugcgguuuuugcuauuguuu

SEQ ID NO: 2455 - RNA, 159 nt, Homo sapiens
caguagaccccagggagcagaccacacuagaagaaguuaugagggacccgugggugaacaguggucaggaguugccucugacaacaugaagaacaaauccuggaccaccugaaucccaaaacaacccagcuuuugguggccaugggauuccaggcugag

SEQ ID NO: 2456 - RNA, 52 nt, Homo sapiens
gcuaacaucuucagggucugcacugugaacuccccuggagauaaguaagucc

SEQ ID NO: 2457 - RNA, 79 nt, Homo sapiens
auaaccaaaagaguauaacuggauuguuugucacacaagauaaugcuugaggugauagguacuccauuuauccuuaugc

SEQ ID NO: 2458 - RNA, 97 nt, Homo sapiens
gggcguggcaagcagggaggcaaagcucgcgccaaggccaagacccgcucuucucgggccgggcuucaguuucccguaggccgagugcaucgccugc

SEQ ID NO: 2459 - RNA, 97 nt, Homo sapiens
gggcgugguaagcagggaggcaaagcucgcgccaaggccaagacccgcucuucucgggccgggcuucaguuucccguaggccgagugcaucgccugc

SEQ ID NO: 2460 - RNA, 100 nt, Homo sapiens
gcggcaagcagggaggcaaagcucgcgccaaagccaagacccgcucuucucgugccggucuccaguuccccgugggccgagugcaccgacugcuccgcaa

SEQ ID NO: 2461 - RNA, 76 nt, Homo sapiens
ucgcccuccagcugcuggagcugcagcccgaccgcgagcgugccaagcggcuucagcagcuagcggagcgguggcg

SEQ ID NO: 2462 - RNA, 76 nt, Homo sapiens
ucgcccuccagcugcugcagcugcagcccgaccgcgagcgugccaagcggcuucagcagcuagcggagcgguggcg

SEQ ID NO: 2463 - RNA, 155 nt, Homo sapiens
gagcucaagucacagcugccccagguuacaguaaauggggaaacccggucuccuagcaaggccaugucacugggccuugacucagaaaggcaccagagguauggaugggaggcugcuuccuccuucagcccaugggaaaaugaccuagaguucac

SEQ ID NO: 2464 - RNA, 70 nt, Homo sapiens
augaucaaggccugauaauacacaaaauuaauuaagaaauuuaguguaggccgggcgcaguggcucaugc

SEQ ID NO: 2465 - RNA, 89 nt, Homo sapiens
ucuguccccacucuagcaccuguacaaugcugcugccuucaaagcccggaccaaggcucgaagccgugugcgggacaagcgggcagaca

SEQ ID NO: 2466 - RNA, 59 nt, Homo sapiens
aacuaugagguuugucuuaguuuuuuauaaggcuuuggcagaggccuaaagcauguuuu

SEQ ID NO: 2467 - RNA, 104 nt, Homo sapiens
guugaaaucuaauguaaauggaagauuugauaugucagguagaguuucaaaugugucuaaugaaagguccuauuuguuaaauccuagugcaugugaauaaaugu

SEQ ID NO: 2468 - RNA, 75 nt, Homo sapiens
ucuuucauaaagagaccucaguuuauagcguaacagacuacacaaugcacugauguuuucauaauguuuaaggga

SEQ ID NO: 2469 - RNA, 149 nt, Homo sapiens
uuccuggugggcugcagacacuaaugguguuggggggucuuggaacagcuucucuauguguggauucguguaaaugcgaagaguucacauauaaagaagugacuuugauucugugauuauauugauuugguacacaguaaaugggaguu

SEQ ID NO: 2470 - RNA, 57 nt, Homo sapiens
uccggcaccagucagaccgauaugucaaaauuaagguaugugguccugggauggaaa

SEQ ID NO: 2471 - RNA, 83 nt, Homo sapiens
cagcgcgcgcuauaccaguccucgcauguggacgaaaaugacgugcagacggugucgcacaagugccugguggugggccugga

SEQ ID NO: 2472 - RNA, 83 nt, Homo sapiens
cagugcgcgcuauaccaguccucgcauguggacgaaaaugacgugcagacggugucgcacaagugccugguggugggccugga

SEQ ID NO: 2473 - RNA, 80 nt, Homo sapiens
uuugugcccccuaccugccauccugauguccccgcgugcccgcagcgcgugcuauaccaguccucgcauguggacgaaaa

SEQ ID NO: 2474 - RNA, 76 nt, Homo sapiens
ccucggaccaugcuaggccacuugcuggggugucaaccuaccaccaaaggggucuuuuagcaaaccucauggggaa

SEQ ID NO: 2475 - RNA, 100 nt, Homo sapiens
ggcugauggaagacuuggaccggaacaaggaccaggaggugaacuuccaggaguaugucaccuuccugggggccuuggcuuugaucuacaaugaagcccu

SEQ ID NO: 2476 - RNA, 121 nt, Homo sapiens
augaccauuaagcaauacgcauuccguaugaugauuauuauguaaaucuaaguauauuucaugauuacuauguaauauauauuaucuauugugauuauuauguaaaugcaagugagcaucu

SEQ ID NO: 2477 - RNA, 88 nt, Homo sapiens
uccuaugugggcgacgaggcccagagcaagagaggcauccucacccugaaguaccccaucgagcacggcaucgucaccaacugggacg

SEQ ID NO: 2478 - RNA, 88 nt, Homo sapiens
uccuaugugggugacgaggcccagagcaagagaggcauccugacccugaaguaccccaucgagcacggcaucgucaccaacugggacg

SEQ ID NO: 2479 - RNA, 83 nt, Homo sapiens
gcgccgcagaagggguccuggugacgagucccgcguucucuccuugaauccacucgccagcccgccgcccucugccgccgcac

SEQ ID NO: 2480 - RNA, 81 nt, Homo sapiens
uauaaucaacauugaauuaucuguuggcagauugaacuuuuagagaaucaaaugcuaacgaaaaauuuaaacaaguauauu

SEQ ID NO: 2481 - RNA, 143 nt, Homo sapiens
uggggucccgcauggcuaaauaacuccuuggcgccuccugcucugcugugccgccagggccuccccuagcgcgccuucuggagaggcuuugugcggauacggggcuggaggccugguggggcuguguccgggggcucgccggg

SEQ ID NO: 2482 - RNA, 84 nt, Homo sapiens
gccccaaggcaggccacgcucauuucucuuuccccuuguacucguagccuccagaggugaaguccccaguggagccuauggcua

SEQ ID NO: 2483 - RNA, 99 nt, Homo sapiens
uuaugauagaguguucagccagagauauuuuaguuaagguauguuuagcuuuuguauacuaguuaagguauguuuagcuuuucuauacuuuacauaaaa

SEQ ID NO: 2484 - RNA, 118 nt, Homo sapiens
ggccggaggcggugcuggcgguggcggcggcagccguggcccggcggccugggacagaaucagagucaacgguggccucggcggcggcggcggcugccgcggcgguggcgacggccgc

SEQ ID NO: 2485 - RNA, 57 nt, Homo sapiens
ccggaggagagcucgcugcgcaugcgcagggagagcgcggccggcgcuccagcgguc

SEQ ID NO: 2486 - RNA, 65 nt, Homo sapiens
ugacugaaugauacucuucuguucuucaaggcaggagaccgggugaugguguugaaccggucagg

SEQ ID NO: 2487 - RNA, 86 nt, Homo sapiens
gggcccggggcuccaggggggcgagagcggcgcgaaucccgcggggcccacugcgcuaggcccccgcugccuguccgcgguuccca

SEQ ID NO: 2488 - RNA, 90 nt, Homo sapiens
ggcccccgcuuccgccgggccccgcugagcucuagacaaaccuccgcuucagaaauaggcugcgggcggccggcuaggaggcuuggcccc

SEQ ID NO: 2489 - RNA, 107 nt, Homo sapiens
ggcagggcuccaggcguccccgaaugcucgucguggaguuuuccugauccugucgggucccuaaggaacgcuuggcggggagcguggacgcccuggggccaggccac

SEQ ID NO: 2490 - RNA, 119 nt, Homo sapiens
ccuugauuuccuuugcucugagcagcuuccuucaggcacagggggguguagaucuugaugggcuuaggcucugcuuugcccagggggagcgggaggggagggaaugcucuuuagaggaa

SEQ ID NO: 2491 - RNA, 82 nt, Homo sapiens
gccaucaguggcuucacuguaguacacggagaugcgguccagcugcaggucgcuguccccgugguaggugccaguggggucg

SEQ ID NO: 2492 - RNA, 86 nt, Homo sapiens
auuuucaguagccaguauuucugauuaacuaaguugaaacucuuauuagaaacuuucaguuggugauauuguauucuagaagauau

SEQ ID NO: 2493 - RNA, 146 nt, Homo sapiens
agaggcaggccggggccaagugcuagugccccgagugcuggcacuguugaccaaguugguggcggaggugaaguggccucuaccuuggggggcagaggguguaugcagggaggcaggcgguagccauggcggggcuaacccucucu

SEQ ID NO: 2494 - RNA, 76 nt, Homo sapiens
ccucugcccagcuugggcccagcugggcucugccacccuaccuguucagugucccgggcccguugaggaugaggcc

SEQ ID NO: 2495 - RNA, 73 nt, Homo sapiens
uugucugugugacccugggcaagucauuuccccuccuugggacucaguuccuugccugugaacggggacagug

SEQ ID NO: 2496 - RNA, 118 nt, Homo sapiens
uaugucagauguccauaccuggguaaaggaaaugaagauaaucuuaauuuguucagugcuuugagggaauuuucuguagauuuucuuuuuagcucuaguuuacaaugucacccauaag

SEQ ID NO: 2497 - RNA, 86 nt, Homo sapiens
cucaucacugagccaggagcuguggacacugcaauggccagugcagacuuagugccuguucuuguggacuuuacaguggaggagag

SEQ ID NO: 2498 - RNA, 94 nt, Homo sapiens
agcaugucccccagaacucggggagcgcaggcaggacaggcuuagagaagacgcgguccccagcgcuugggccacggacgucccaccccgcucc

SEQ ID NO: 2499 - RNA, 170 nt, Homo sapiens
uaggcacucaaauauuuuugcuguuuuuguuauuauuaagcuaauaagccaauuugguaccacugacacagucugcuauuuaaaugugauuucauguguuggugacuuuuuguuuguuuguuuaauuuguccuagcugcaguuuaaacagcauugaagucagaaccuggu

SEQ ID NO: 2500 - RNA, 113 nt, Homo sapiens
cuuucuaaagaguuuuuaugagugauuuuugcaauaaaauauucuuuuuucuguauaucuuucaggcauuaagggaucauugcaagagcagcgugacugacauuaugaaggcc

SEQ ID NO: 2501 - RNA, 58 nt, Homo sapiens
aaaaguaauugcaguuuuugccauuucauuggcaaaaaccgcaauuauuauuauuuuu

SEQ ID NO: 2502 - RNA, 59 nt, Homo sapiens
uauuugucagacuuuuccuuuuuaauauguagugaugaaggcccagaaguaggaguguc

SEQ ID NO: 2503 - RNA, 84 nt, Homo sapiens
gucacagcucugcucggcuucuuuugcaaaccggucacaccaugugggaaggaaaauagccauugagguagcuuuugguggccu

SEQ ID NO: 2504 - RNA, 57 nt, Homo sapiens
ucucagcaaucagacugucgacauuccagaaaaugucgacauuacucugaagggacg

SEQ ID NO: 2505 - RNA, 58 nt, Homo sapiens
gggcaggcugaugagacuaaggcgaaugcgacuccgugcucucuggcccuuggcuccu

SEQ ID NO: 2506 - RNA, 81 nt, Homo sapiens
gaggauggccacugauguguguuuguggauaccugggcaucgacccagccugcaggugagcucugggccauguugccuuga

SEQ ID NO: 2507 - RNA, 101 nt, Homo sapiens
uucuagagauaaucuccagucccugugcagaaacugucauugcacuuucugcugaaauggcaguuucuucucagcaaggugagauuauggaauccagaauc

SEQ ID NO: 2508 - RNA, 75 nt, Homo sapiens
aaggugggccagagcuuccugagguaucaggcugaagugagccuccagcugagaccacagucuugcuuaguuuuc

SEQ ID NO: 2509 - RNA, 72 nt, Homo sapiens
uccugcucuccccuagggcgcgcgucacaaucucuggucccccguagacgccgccgcggggaaggcggggcu

SEQ ID NO: 2510 - RNA, 54 nt, Homo sapiens
aagcuccuuucucagacagccacucauuccggggcccuggacgugggagcuuuc

SEQ ID NO: 2511 - RNA, 122 nt, Homo sapiens
ggccuccuucucagguucagcucuguucagcuccuuggggaucuccuguuucacaucucaggagucacugggaagaugaccacagaaacugccucugaggaugauaacuuuggaacugccca

SEQ ID NO: 2512 - RNA, 81 nt, Homo sapiens
uagccccacaauuugauggaaauggcaggcuguuguaucaugugggacaauggcucauucccauugaguugugugguuagu

SEQ ID NO: 2513 - RNA, 81 nt, Homo sapiens
uagccccacaauuugauggaaauggcaggcuguuguaucaugugggacgauggcucauucccauugaguugugugguuagu

SEQ ID NO: 2514 - RNA, 62 nt, Homo sapiens
ucucggaggagcaguucugggaggccugcgccgagcuccagcagcccgcucuggccggggcc

SEQ ID NO: 2515 - RNA, 58 nt, Homo sapiens
ucucugaggcccuggcaucuuuuaauguaaguuguauggagcuggaaggaaggagagu

SEQ ID NO: 2516 - RNA, 75 nt, Homo sapiens
ggggaagcugcaggaguucggcgugggugauggcagcaagcugaccuugguacccaccguggaagcgggccucau

SEQ ID NO: 2517 - RNA, 133 nt, Homo sapiens
gggucaccuacugguuuucauggcauugauuuauaguuccccuuccuguuuuuguuuccucaagaggcacugagcauuacaugacuuucuuucuuuaacucugccugugauaagcaggaggaagaggacucug

SEQ ID NO: 2518 - RNA, 70 nt, Homo sapiens
ugcuggcggagcagcugcggcgcgacgcggagggcggcccgggcgcguggcggcugucacgggcggcggc

SEQ ID NO: 2519 - RNA, 119 nt, Homo sapiens
gcgccccucugggugacuuggccgugagaaagugaaaggagcccgcaggcggcggcgacagcugcgcugggaggggcuuguuuccaggcucagaggccccgcgcacucugcgggugcgg

SEQ ID NO: 2520 - RNA, 56 nt, Homo sapiens
caggaacagcgagaggggaggaagugcuacacacuuuuuuuuuuuuuuuuuuugag

SEQ ID NO: 2521 - RNA, 111 nt, Homo sapiens
ccuugaggcaggcuggcuuccucaccaccuugugcacugcugcucccacaccacagugacuagcagcacauaaugguuugaauuaaagcugaaguaaaaaauauccagguc

SEQ ID NO: 2522 - RNA, 137 nt, Homo sapiens
cggaugugccgccgcuuuuuaguuucugaggcgccggcgguguuccugguagcgucagccuccuggcuuuuccuuuuccuggacgcuucagggcuccgcggccugcgcuagacuggaggguccgcgucacucucgcc

SEQ ID NO: 2523 - RNA, 93 nt, Homo sapiens
ggaugcugcccugcuacgguauacacaaugacaccuaccgcaaagaaguaucuggcgucaaacaucaguagugcccaaguugggcagcucugc

SEQ ID NO: 2524 - RNA, 124 nt, Homo sapiens
gcuguguaccuggguggauaugugcacacuggaaugugggucccugugugagguuguaacauuugcuugcaugugaggaugcauaucuauguguaaaugcucucaugucuugcauguuuagugu

SEQ ID NO: 2525 - RNA, 148 nt, Homo sapiens
cccaggccgaggaacccccagcccagggacuagacaccaccagggccgggcggagccagagccagacgcgccggagcgggcgccucuacgccgugaguccgagucuggggcccgaggcgggguggggcuuggggcucagccgcgggaa

SEQ ID NO: 2526 - RNA, 91 nt, Homo sapiens
ggcccagccagcugugccggcguuuguuggcugcccugcgcccggcccuccagccagccuucugccggccccgccgcgauggaggugcccc

SEQ ID NO: 2527 - RNA, 94 nt, Homo sapiens
ucgaguacauucgaugaugauuccauucgaguacauucgauggugauuccauucgaugccauucgaugaugauuccauucuauuccauucgaug

SEQ ID NO: 2528 - RNA, 76 nt, Homo sapiens
ugagguacauauaucuaauggaguaaucacaagauacagaugccugcuuuucugguucucuguuuaagacuucacu

SEQ ID NO: 2529 - RNA, 73 nt, Homo sapiens
ggcaguguagcgagaaagguuuucgccuccuguuucagcggugacggcucuuggguuuucucgggguggcuuu

SEQ ID NO: 2530 - RNA, 73 nt, Homo sapiens
ggcaaugucgcgagaaagguuuucgccuccuguuucagcggugacggcucuuggguuuucucgggguggcuuu

SEQ ID NO: 2531 - RNA, 72 nt, Homo sapiens
ggcaugucgcgagaaagguuuucgccuccuguuucagcggugacggcucuuggguuuucucgggguggcuuu

SEQ ID NO: 2532 - RNA, 65 nt, Homo sapiens
uuaccaaggugacauaugccacucagggggacgcucccagugccaucagugugaacagugugaca

SEQ ID NO: 2533 - RNA, 136 nt, Homo sapiens
ggggucagucagucgcucccugucgcugccggagagucucugcuucccccuuccuacgcgcuccgcggcgguagcucgggcucuccggaggagggggcgacagaguaaaagagaggcugacuuaauaaaguuuccu

SEQ ID NO: 2534 - RNA, 73 nt, Homo sapiens
ggagggauggugugggauuuuggccgagggaagcaggacagagaaggagcaggaagcuaugcuaauuuuccug

SEQ ID NO: 2535 - RNA, 134 nt, Homo sapiens
gaaggaaaaaugcaagagaaagaggagcaccaggagaucuaucaugccgaggcugcagcugugcaggucggaagacaggcugcagcacguggcgggaccugcccuggaggcucuuagcuguggggagucuucau

SEQ ID NO: 2536 - RNA, 55 nt, Homo sapiens
gaaguauauucuguaguagcucuucaaaaaggggagcauggaggauagauuuuug

SEQ ID NO: 2537 - RNA, 67 nt, Homo sapiens
uggauuagggcccacccagaugagcucauuuuaccuaaaugaccucuuucaggacccaaccuccaaa

SEQ ID NO: 2538 - RNA, 89 nt, Homo sapiens
cuccacaauagggguaucaauggcaucagggaaggccauauuguccuaaaacacuucuauaagauuccaucuccauucauuugggagaa

SEQ ID NO: 2539 - RNA, 75 nt, Homo sapiens
aggcuccuccccuaauccuaaucucauggcuuuucauuaguuuuuggucccugagcaaggagggggugaguuuua

SEQ ID NO: 2540 - RNA, 85 nt, Homo sapiens
gguuuuuggucccugagcaaggaggggguuaguuuuauggagggauuuacuuuuacccuugcuuuuaaguuaaacuauaaacuau

SEQ ID NO: 2541 - RNA, 70 nt, Homo sapiens
aauccuaaucuuguggccuuucauuaccaagacaaaggcgauuuuggucccugagcaaggaggggguucg

SEQ ID NO: 2542 - RNA, 79 nt, Homo sapiens
ggccccccuauccuaaucuuguggccuuucuuuaguuuuaaaaaggugguuuuuggucccugagcaaggaggggguuag

SEQ ID NO: 2543 - RNA, 107 nt, Homo sapiens
uaauccccugcuacuuguuagaggagcuggaugacacuucgugggcucauucucauaaauaagcugcugaauggaguccucuccucccaagaguugucgguguugca

SEQ ID NO: 2544 - RNA, 70 nt, Homo sapiens
uuugugacaggcuggagugcaguggcacgaucucagcucacuguaaccuccaccucccagguuccaagcu

SEQ ID NO: 2545 - RNA, 71 nt, Homo sapiens
uccccgcccuaaguucucuguguguguccugggggaccagcagcacugugacgaggcuaaggccguggaua

SEQ ID NO: 2546 - RNA, 125 nt, Homo sapiens
ucucuuccauuguagagcaaauccauccccacacccuguucacuccuuugcugauugguuucguaaucguagcuggcaugaugugcauuauugugaugauucugaccuacaaauauuuacaggua

SEQ ID NO: 2547 - RNA, 69 nt, Homo sapiens
gccuggccugccucaccaaccugggugacguccacgucuucucggugccuggccugcggccccaggugc

SEQ ID NO: 2548 - RNA, 71 nt, Homo sapiens
ccugaggccuucccagaagcugaaggaauuuggcgcuaugcuuccuauacagccuccagaacccugaggca

SEQ ID NO: 2549 - RNA, 89 nt, Homo sapiens
gggagugagugcaaaaagcugaguauggugagagaagccugugcccugauccaaguuuacucaacccucucaggugaccaaaauccccu

SEQ ID NO: 2550 - RNA, 72 nt, Homo sapiens
ggccggcgggacgggagcugcggcgcuggcuacgagagugacccagucagcguugguucccgucuuggccau

SEQ ID NO: 2551 - RNA, 62 nt, Homo sapiens
ugcuuuccccacauucugugagcuguguucccacaccuggaaggaaggaggaggagagcgaa

SEQ ID NO: 2552 - RNA, 65 nt, Homo sapiens
cccgggggcggcagagaggaagaggagggagaggagagcgguccggaagccgccgagcccgggca

SEQ ID NO: 2553 - RNA, 133 nt, Homo sapiens
aggaaguaggcaguccaguccugaccugcucggaguugaagcagucggcguuggaagagccugaacacccggccuaccacuuguccuuccaucucugggccuucaggacagagcggacuccccucuccccuaa

SEQ ID NO: 2554 - RNA, 103 nt, Homo sapiens
uuaguagcuguggaggaagaugcagagucagaagaugaagaggaggaggaugugaaacucugaaguauaucuggaaagcggucugccccuggaggugguagca

SEQ ID NO: 2555 - RNA, 97 nt, Homo sapiens
uuagcuguggaggaagaugcagagucagaagaugaagaggaggaggaugugaaacucuuaaguauaucuggaaagcggucugccccuggagguggua

SEQ ID NO: 2556 - RNA, 103 nt, Homo sapiens
uuaguagcuguggaggaagaugcagagucagaagaugaagaggaggaggaugugaaacucuuaaguauaucuggaaagcggucugccccuggaggugguagca

SEQ ID NO: 2557 - RNA, 60 nt, Homo sapiens
ucuuaaguauaucuggaaagcggucugccccuggaggugguagcaaguuuccagaggaaa

SEQ ID NO: 2558 - RNA, 65 nt, Homo sapiens
uucugaccaauauucacccucaaccuuauuuuuauaauagaugaccguggaaaaaguacagggua

SEQ ID NO: 2559 - RNA, 99 nt, Homo sapiens
ugcugaaaaugcaaaaauuagcuggucgugguggccucggccucccaaaguguugggauuacaggcgugagccucugcucccggccuaauuuuuguauu

SEQ ID NO: 2560 - RNA, 125 nt, Homo sapiens
uucucucugaugcuucagucacgacaugaaucuauaaggugcuuugaaaggaauaauaauucuuucaaauaauuguacuuccauuuaauucauuauagucaaacuauuaguaaucaaagagaaua

SEQ ID NO: 2561 - RNA, 63 nt, Homo sapiens
ccaggugggugugggcaggggcugcauuuuaugaaacugcccagcaagcugcgcucccugggg

SEQ ID NO: 2562 - RNA, 92 nt, Homo sapiens
ccgcggcgcggcgcugccccugagagggagcggcggcggccuccuccgccccgaguccucgcucgggggccgcgcgaggacggcgcccggcc

SEQ ID NO: 2563 - RNA, 68 nt, Homo sapiens
uccugaugcccguugucuaggagacagagccaagcacugcucacgucucugccgccugcguuuggagg

SEQ ID NO: 2564 - RNA, 67 nt, Homo sapiens
ucggcagaggcugacccgcggcugauugagucccucucccagaugcuguccaugggcuucucugaug

SEQ ID NO: 2565 - RNA, 95 nt, Homo sapiens
ugccaauuucugguuggaauagugacaacaugcuggagccaagugcuaacaugccuugguucaagggauggaaagucacccguaaggauggcaau

SEQ ID NO: 2566 - RNA, 115 nt, Homo sapiens
gggcuuugccuugaaacccgggacgccaggggcgcucccgcaaguggggguccuccgggacuuggaacgccccggcugggugguguccgggcguccuuuccccgcuucuucccac

SEQ ID NO: 2567 - RNA, 109 nt, Homo sapiens
ugcugcccgagcugggcgugcacggacagcugcgccuggggaccgcgugcgugcuaaucgugggcugcggugggcucggcuguccacuagcgcaguacuuggcagcggc

SEQ ID NO: 2568 - RNA, 138 nt, Homo sapiens
gccgcgccgcucuugccgugggugccgacggcggcgccgggacgggcgugggggguagggcgagucauaugauccgcucggcuuccugggucuggcugcugccgcccgccgguguccgcccgugucgcgccggggcac

SEQ ID NO: 2569 - RNA, 99 nt, Homo sapiens
gcaaauuugucauuuccaaaauacugguucuuuuuuuucuuucuuuuuuacuacuucuuuagaaaaagaaccaguauuuuggaaaugacaaauuuguac

SEQ ID NO: 2570 - RNA, 97 nt, Homo sapiens
caaauuugucauuuccaaaauacugguucuuuuucuaaagaaguaguaaaaaagaaagaaaaaaaagaaccaguauuuuggaaaugacaaauuugcu

SEQ ID NO: 2571 - RNA, 122 nt, Homo sapiens
guguucuccacgccgcacgggcucgaggugcacgugcgcaggucccacagcgguaccagacccuuugccugcgagaugugcggcaagaccuucgggcacgcggugagccuggagcagcacaa

SEQ ID NO: 2572 - RNA, 53 nt, Homo sapiens
ugccgcgcgcgcgcuccccccugggguuccggauggugagcggcgaagguaag

SEQ ID NO: 2573 - RNA, 77 nt, Homo sapiens
uguggauggaagauacgcuuaugugguguugaggaaaacagacauugaccucaccaagagggcgggagacucacgga

SEQ ID NO: 2574 - RNA, 169 nt, Homo sapiens
auauucuaguaaagauuuggggaggggaggguagccacagaaagaaucuuguuuaucuaaagcaggaacuugaucuugguuuugcuggauugcuuuccauagacauagauucuuauuaaauauuuguuuugguacuaauuauuuuaauuauucuuuaauuagaguguua

SEQ ID NO: 2575 - RNA, 66 nt, Homo sapiens
ccuagggcucuuccuguggccccugaccccucaaauuggccaggaagggcaggagagccuugggca

SEQ ID NO: 2576 - RNA, 79 nt, Homo sapiens
cagaguacaguugugaauuuggcuccgcgaaguauuaugcacuguguggcuuugguggggucuuaaguuguggucugac

SEQ ID NO: 2577 - RNA, 106 nt, Homo sapiens
ccuguguuggccaauggaaugugagcagacagggugugcgcagaggcguuaaaugcgcuugcaagguucuucucucuugugcuccuuucauuccugaagacaggag

SEQ ID NO: 2578 - RNA, 64 nt, Homo sapiens
cauuugcagccugcaggggccuggcaaucuuuuuugcuaccuguuuacagccuggaaccaugau

SEQ ID NO: 2579 - RNA, 116 nt, Homo sapiens
aagcccagcauuuugcagcuuugaagcugcuggggaucacgacugucucuguggcccuuaccuggccacagauguacccuggcaacccgcucacagugcccugcgugcagguuuau

SEQ ID NO: 2580 - RNA, 53 nt, Homo sapiens
uauacuuuuaauuuuagaauaguuuuaaauuuguggaaaguugugaagauagu

SEQ ID NO: 2581 - RNA, 125 nt, Homo sapiens
ugaaagaguagugcaguaguucaggucugagugugugauguguuggaggaugggcaauuguccauuuaaguaucaguggauaauuguuauuuuuaaaacuucacauaguuugauucucucucaaa

SEQ ID NO: 2582 - RNA, 125 nt, Homo sapiens
uggcaguuauuuuauuaggucggugcaaaaguaauugcuguuuuugccauuaaaaauaauggcauuaaaaguaauggcaaaaacggcaaugacuuuuguaccaaucuaauaucucugcugcuaua

SEQ ID NO: 2583 - RNA, 89 nt, Homo sapiens
auaguuaagugauuuaaagacugcgugucaagauuccauaauguuauaagguuauuuuaaaguacucauucuuuucaccaaugcuguuu

SEQ ID NO: 2584 - RNA, 80 nt, Homo sapiens
cuuguguuccagguggcagagaugcauggcgagcugauugaguucaacgagcgccugcacagggcccugguagccaagga

SEQ ID NO: 2585 - RNA, 52 nt, Homo sapiens
gcggcacuaccugcugaagcgccugcgcaaggccaagaaggaggcgccgccc

SEQ ID NO: 2586 - RNA, 90 nt, Homo sapiens
uagguaauuccuccacucaaaacccuucagugacuuccaugacaugaaauaggaagucauuggaggguuugagcagaggaaugaccuguu

SEQ ID NO: 2587 - RNA, 183 nt, Homo sapiens
cccuguggcgugcggcggggugagaggggcggggccugcgcgcgagggacccgggacgugcgagcgggcgaagucggcgcuugggguggcucuggucccuaagucgcuugggcuucgcccgaucccugcacaucccuacuccccgccgucgucccccuucccagggccccagagccuaggguu

SEQ ID NO: 2588 - RNA, 57 nt, Homo sapiens
gggacaccacuacuggacacggucuuguagaggcagcuguccaguuuuggugcuuga

SEQ ID NO: 2589 - RNA, 136 nt, Homo sapiens
ggucaguugcuuuugggagaccgcaguggucccucggucuuaucuuuuagaugugguugaaguaaacccugccaguuuaauuaaccacuaagcgguucccuucacuccugccucccucccucccucccucugccag

SEQ ID NO: 2590 - RNA, 143 nt, Homo sapiens
gcuggcucugcccaccugucccgcuggccuggcaggugacggugcuggauguggccuuuuugccuuuucuaaaggccacauuuuccagcccauucaaccuuccagagcccucugaaguggccacaggccccaucaaccaguga

SEQ ID NO: 2591 - RNA, 74 nt, Homo sapiens
agucaggggcagagcagggcggucugagcgugcgggcgacgcgggucucacucguccgcuccgcucuggacugc

SEQ ID NO: 2592 - RNA, 83 nt, Homo sapiens
uggccggggucagcuacgcggcgcccuggugggugagccuccugcaccggcugccccacuucgaccugagcugggaggccacu

SEQ ID NO: 2593 - RNA, 111 nt, Homo sapiens
ucuguuuugauuuucuaaggcauauagauagauuugucagucuuuaccuuuaugguuuguacuuauagaauuuuguuugaaauccuuccucacccugaauucauacagaua

SEQ ID NO: 2594 - RNA, 147 nt, Homo sapiens
gcccaguuccuaagggugcaacuuacagcaagccuguccaucaugguguuaaccagcuaaaguuugcucgaagccuucaguccguugcagaggagcgagcuggacgccaccauggggcucugagcguccugaauucuuacaggguug

SEQ ID NO: 2595 - RNA, 120 nt, Homo sapiens
aggguguaacuuacggcaagccuguccaucaugguguuaaccagcuaaacuuugcucgaagccuucaguccuuuguagaggagcgagcuggacgccacuuuggggcucuaagaauccuca

SEQ ID NO: 2596 - RNA, 95 nt, Homo sapiens
uccaggccaucacagagccaugaaccagcagcacaugaugccuucccaagccuuccagaugcggcguucccugccuccagaugacauccaggaug

SEQ ID NO: 2597 - RNA, 62 nt, Homo sapiens
gccacugucucuagucugggugacuacagaugcccagagcccagacuggacuagcaaggccc

SEQ ID NO: 2598 - RNA, 55 nt, Homo sapiens
gcagcgcagggaagccugggggccagaggucgccgcugccgccaugccgcugcuc

SEQ ID NO: 2599 - RNA, 124 nt, Homo sapiens
ggcagcccuagucccagcaccggguccuugcgcugagucucgggaccacagccggggaggcgggguccuucucuggggcggucgcguuggcagcggaugcgggaagccggacucugggcgucau

SEQ ID NO: 2600 - RNA, 87 nt, Homo sapiens
cagccuccugaguugucuucuucagcaucccccagguaaaguccggggcuugugucauccuaggaagccgcgucguccggggcugcu

SEQ ID NO: 2601 - RNA, 132 nt, Homo sapiens
cccuguauuuuugaauucaccuacucacucaaauguauuuguaacccucaaaccagcaugcucagugccuuucuggucauuuuaggacacucauaaguacgagucucaaaugugaggucaaguaagagggca

SEQ ID NO: 2602 - RNA, 103 nt, Homo sapiens
gggccuggggggcugggacgcgggagaugccuuccugccccccccccccccccacuucugagcgcccuaggaggcuccugcccucccgucccaccagguccug

SEQ ID NO: 2603 - RNA, 70 nt, Homo sapiens
accugggaaggcagggguagcccugggguccugggccucacuggaaggcccgcugcuccauggagggugu

SEQ ID NO: 2604 - RNA, 57 nt, Homo sapiens
agaagguucugcgccucacugagugccuuaggccccugcaguaugugggccuucucc

SEQ ID NO: 2605 - RNA, 72 nt, Homo sapiens
ccugccggagccgcugccgcuauggaugaucgagaggaucugguguaccaggcgaagcuggccgagcaggcu

SEQ ID NO: 2606 - RNA, 72 nt, Homo sapiens
ccugcuggagccacugcugcuguggaugaucgagaggaucugguguaccaggcgaagcuggccgagcaggcu

SEQ ID NO: 2607 - RNA, 53 nt, Homo sapiens
ugcaggcggggcgaaggcggagccccgggaccguuugucccccgaaucgcagc

SEQ ID NO: 2608 - RNA, 84 nt, Homo sapiens
ucuacagguugauaaaaauuaaagaguggguggacaaguaugacccaggugcuuuggucauuccuuuuaguggggccuuggaac

SEQ ID NO: 2609 - RNA, 55 nt, Homo sapiens
aggcccacgggggaggguguuggcagacagaugcccuccaggcccuggggccucc

SEQ ID NO: 2610 - RNA, 95 nt, Homo sapiens
gcuguuauaaauaaaauacaugcugagccugcaauuugcucuuaaugaaggccacuugucaguagacggugcugcuaaugcguguccugcagcaa

SEQ ID NO: 2611 - RNA, 66 nt, Homo sapiens
gcuggaagcuauugggcuggcagcaggacgacuggcuguccuccugcccacccacacugacggcau

SEQ ID NO: 2612 - RNA, 71 nt, Homo sapiens
ggcagguuucuacaauggccugggaauggacugauuauuuuuauacauuuucuggccugagagaaagccaa

SEQ ID NO: 2613 - RNA, 144 nt, Homo sapiens
agagugacacccauuuauuaucucaugguuccauaggucagaaguuuggauguaguguggcuggguaagacccugcacagaggacccagccacacuauguccaaacuucugaccucggagaugugagccagggcugcauucuca

SEQ ID NO: 2614 - RNA, 127 nt, Homo sapiens
aggcagcaguuauuaacacgggaacauggcggccgcagccucggcuacagcuucggcggcgaaggucagcgccgacggcagccggcaccugacggcgugaccgacccgagccgguaaccgcgccuuc

SEQ ID NO: 2615 - RNA, 117 nt, Homo sapiens
cauaaccaucuuccuagcugauugugcaauguuagcauuugucucugaacccgaccccaugguggguucagagcacagaguuacaggcacagagcugagcaaggcacaggcuguguu

SEQ ID NO: 2616 - RNA, 74 nt, Homo sapiens
cugucuucucuggcccauggacaucggaacaccuggucucaggucuucagacuguggggcuuacacgagcagcc

SEQ ID NO: 2617 - RNA, 60 nt, Homo sapiens
gugugaaugaugaacagguagguuggugguagguaccagguuggccuggcaugcccacuu

SEQ ID NO: 2618 - RNA, 143 nt, Homo sapiens
cccgaagaguguaagauguucgccugcgccaagcucgccugcacccccucucuggugcguagcccaggcagggucggggggauugaggggugggcguuuuggccuagagcguccacguuguugaauggggcaaccuucgggcg

SEQ ID NO: 2619 - RNA, 55 nt, Homo sapiens
uucccccaguuuguccgguucagcuggcgcacggcccagaccauccuggagaaag

SEQ ID NO: 2620 - RNA, 52 nt, Homo sapiens
gacgcaacaagggugcugcccgaguuaucgggacccuguugggaacugucaa

SEQ ID NO: 2621 - RNA, 58 nt, Homo sapiens
cgagagacgcaacgagggugcugcccgaguuaucgggacccuguugggaacugucgac

SEQ ID NO: 2622 - RNA, 105 nt, Homo sapiens
uaguugaaauauuuuucuggccuuucugcccguggacgccgccgaagaagcaucguuaaagucucucuucacccugccgucaugucuaagucagagucuccuaaa

SEQ ID NO: 2623 - RNA, 96 nt, Homo sapiens
gcuugcuccuuucugcccguggacgccgccgaagaagcaucguuaaagucucucuucacccugccgucaugucuaagucagaggugaguuaggcgc

SEQ ID NO: 2624 - RNA, 95 nt, Homo sapiens
ucuucuccuuucugcccguggacgccgccgaagaagcaucguuaaagucucucuucacccugccgucaugucuaagucagagucuccuaaagagc

SEQ ID NO: 2625 - RNA, 98 nt, Homo sapiens
ccucggacuccugccucacucauuuacaccaaccacccaacuaucuauaaaccuagccauggccauccccuuaugagcgggcgcagugauuauaggcu

SEQ ID NO: 2626 - RNA, 88 nt, Homo sapiens
agcaucuggccaggcaugguggcucucauauguaaucccagcacuuugggaggcugagguggguggaucacuugaggucaggaguuca

SEQ ID NO: 2627 - RNA, 69 nt, Homo sapiens
caggaguuugagaccagccugggcaacauggcaagaccccgucucuggccaggcaugguggcucuugcc

SEQ ID NO: 2628 - RNA, 120 nt, Homo sapiens
acagggauaagcuucuaccagccugguucuggagcuggcaagugaacaaaucccacaaguggcuuucugaucaugauaaaagcagcagcccuggccaggcaugguggcucucgccuguaa

SEQ ID NO: 2629 - RNA, 80 nt, Homo sapiens
ccuggccaggcaugguggcucucgccuguaaucccaguacuuugggaggccgaggcgggcuuaucaccugagguuaggag

SEQ ID NO: 2630 - RNA, 129 nt, Homo sapiens
guugcagugagcugagauccugccacugcacuccagccugggugacagagucagacccugucucaacaacaaaaagaaaagaacccaggccuggccaggcaugguggcucucaccuauaaucccaauac

SEQ ID NO: 2631 - RNA, 61 nt, Homo sapiens
uacugugagaauuuugggagugucuauuagcuugcagcacuuuucuuggauucuguguauu

SEQ ID NO: 2632 - RNA, 82 nt, Homo sapiens
caggggaaacugggcaaaggagcaggcugguaggauggaaaaaugaugugccaacuuucauuugaauaguuuuucuccugca

SEQ ID NO: 2633 - RNA, 60 nt, Homo sapiens
agcaaugaaugcucguuagccaugugccuggaggaaggucacagcucagccagcagcuag

SEQ ID NO: 2634 - RNA, 193 nt, Homo sapiens
cuggagaacccuggcgccugcccuggucaccagccuggcugagguaugcuguugcgcuguccuuccucuggggagcaggcuccgggggacagggaaaagcacacaaggaacuuguccucuagggccugcagucucaugggagagugacaugcaccaggaccaccgcugugaagggcuaagugcuguccuggag

SEQ ID NO: 2635 - RNA, 78 nt, Homo sapiens
caaggaagggagcgaagagggaauagcccacagcagcccaguggaaagcauggcauuucuuuaaaguuuauucuugua

SEQ ID NO: 2636 - RNA, 91 nt, Homo sapiens
ggccggggcaccuucgucggccgugcccgugccucugugccguggacgcgcucgggacacggggccaccacgugggucgcuuaccggccag

SEQ ID NO: 2637 - RNA, 70 nt, Homo sapiens
cggggcggcuccgcagcccgccgggagcucugaccgaggcgccucgcuggggcggggaccuugccuugcc

SEQ ID NO: 2638 - RNA, 73 nt, Homo sapiens
gccacggaggcagggucucuggggacugucgggggguacagagggagaaggcucugcaagagcucccuggcaa

SEQ ID NO: 2639 - RNA, 79 nt, Homo sapiens
ggagcagggucgcuaagguccugcccacugaggggacagccuucugggcagggaccucggggggcuucaagggcucugc

SEQ ID NO: 2640 - RNA, 66 nt, Homo sapiens
ucuccucccuucacacucauuuccccuucgccgaggagagaagggggggaggagagagaagagacc

SEQ ID NO: 2641 - RNA, 141 nt, Homo sapiens
guugccuccuaguggcugugucugucuuggacaccgguaucugagaacugagaacaauauuuguuccauaaaugaggcaugaauauuacucuuuaaagauucccuguugaaggcaggcacaguggcucacacguguaaucu

SEQ ID NO: 2642 - RNA, 57 nt, Homo sapiens
cauccaagaggagaaucuuccccaggguuuaguccuggggcuggcacucguugugac

SEQ ID NO: 2643 - RNA, 66 nt, Homo sapiens
cccgacgccacgcagcugcgcgcagcugguucccgcucugcagcgcaacgccugaggcagugggcg

SEQ ID NO: 2644 - RNA, 129 nt, Homo sapiens
uccgcaggccgcggcguacggcaggugcgugcaggccuccacggccccgggcggccgccugaguaaggacuucugcgcgcgggaguucgaggcccugcggagcugcuucgccgcugcgguaggugggcg

SEQ ID NO: 2645 - RNA, 102 nt, Homo sapiens
aguaguaguggcugggucuuccuugccuacaucaucaaaagugaaugcaacuguaccaaguaauaugaugucaguuaauggacaggccaaaacacacacuga

SEQ ID NO: 2646 - RNA, 67 nt, Homo sapiens
agcaugggagggguauggagaaguccaagugagcacucuuucuccaguacucucaaaauacuguuau

SEQ ID NO: 2647 - RNA, 121 nt, Homo sapiens
cggcugaccaggaaccugggcgagcagcggcgggggcccgaggggucaguaccaguaggcgcggcucacacgcucgggaagacugcgcccucucccccaucccuccucggaggcagccgca

SEQ ID NO: 2648 - RNA, 86 nt, Homo sapiens
ggcuuugguagcauguuggaaaaaguuuguccccacugcaguuucuguuuuaguucuuggcauuuuccauguauccaauuagccuu

SEQ ID NO: 2649 - RNA, 78 nt, Homo sapiens
cacacauacaauaauauucauaaugcaaucacacacaaucaccaugugacugcauuaugaaaauucuucuagugugau

SEQ ID NO: 2650 - RNA, 102 nt, Homo sapiens
caggugcccacacauacuacaauaauuuucauaaugcaaucacacacaaucaccgugugacugcauuaugaaaauucuucuagugugauuuacagcucuguc

SEQ ID NO: 2651 - RNA, 72 nt, Homo sapiens
ugggacugugcaggguggauccagggugaggguacagucggccccuucuccuggcaaccucccugcccuaaa

SEQ ID NO: 2652 - RNA, 92 nt, Homo sapiens
gggggugaggaaggcagaucuuagagcuuuggcaggacggcaaggaggccuuuccuugcccuccaaagcucuaggccuuuccuaacuuuuau

SEQ ID NO: 2653 - RNA, 74 nt, Homo sapiens
auguucuccuuugacuccgggucucacauccaggucacgcugaugaaagagguggguuaaaaugacucacauga

SEQ ID NO: 2654 - RNA, 66 nt, Homo sapiens
ggucuguaaacggcugcacacuucaggcacuguaguugcugaagaugcuuuguuaaaugugaccuu

SEQ ID NO: 2655 - RNA, 60 nt, Homo sapiens
cagcugaccuuuuacguuaacuggggcaaagccugaacggauaaccagaggccaacugcc

SEQ ID NO: 2656 - RNA, 95 nt, Homo sapiens
cacagcgguguucauacaagcaucauuggugauaaucaaaaaggggaaacaucccaaaugaccaucagcuggugacugccuaaacaaaaugugcu

SEQ ID NO: 2657 - RNA, 64 nt, Homo sapiens
ugcugugaaggugcugaugaaguucauggagauguugucuaaggacuuggacuacuacggcaca

SEQ ID NO: 2658 - RNA, 76 nt, Homo sapiens
acacaauguucauugaaauuggcuuucaucugaggaaucccaggguggcuccugcuucaugaugugcauucugucu

SEQ ID NO: 2659 - RNA, 85 nt, Homo sapiens
uguuuagcuauuuuacaggagucaacaagauaauuaaauaucuuggugucuuguuucuauuguguggcuuuuuaaaaaugacaaa

SEQ ID NO: 2660 - RNA, 87 nt, Homo sapiens
ggcgcugccuuuccucguuggcuacuuucaguaaguugugaccaguaugucuggacguggcaagcaaggcgguaaagcucgcgccaa

SEQ ID NO: 2661 - RNA, 64 nt, Homo sapiens
gugcacacgggcgagaagcccuaugccugcggggacugcggcaaggccuucagccagcgcauga

SEQ ID NO: 2662 - RNA, 94 nt, Homo sapiens
aauagaacucaaguuucaagguacaguuuucugaccccaaggcaacuauggucuacccccagaaggcuggauugaggcucuagcauuuuguuuc

SEQ ID NO: 2663 - RNA, 150 nt, Homo sapiens
uacaaauagagugugcaaacaauaguacugauuaagugacaaauguugaggccugggaacugauuuuuggcacugacaaauuaaggcagauuagaccgccuuucaggacacuuuugauaaugcuacguguaugugaaagaagaagguauc

SEQ ID NO: 2664 - RNA, 90 nt, Homo sapiens
guaacaaauggcuucuuuuguccuucccuuuguuuacuacuccaaccagaucuuuaagauagagcgugaaggcgaaugccagcguuacaa

SEQ ID NO: 2665 - RNA, 78 nt, Homo sapiens
acccuuuccuccugccgggcugcagggacagugacagugagcagcacugcccgcccaggcaaccuggaaccagggucg

SEQ ID NO: 2666 - RNA, 120 nt, Homo sapiens
ggccggcucuacguucccuguucucgccugcagcuccgccauggcuccuaaaggcagcuccaaacagcagucugaggaggaccugcuccugcaggauuucagccgcaaucucucggccaa

SEQ ID NO: 2667 - RNA, 71 nt, Homo sapiens
ugaagcggccucaggccuguguccacggccuguguugguccagguguacacagcacugggguccugucacc

SEQ ID NO: 2668 - RNA, 107 nt, Homo sapiens
gugaauccucuuguuuaaauuguaaaucauguggcaucucuguucucugugguaacauaggaaaaaggucggggguucuuuggucaaaauaggggugggcuucaugc

SEQ ID NO: 2669 - RNA, 133 nt, Homo sapiens
agccuguccucaccgucucggggguuguggcccccgcccccucccuauaugcaccccuggaaccagcaagucccagacaaggagagcggaggaggaagucaugggaacgcagccuccaguuguagcagguuuc

SEQ ID NO: 2670 - RNA, 70 nt, Homo sapiens
aggugaggauauucauacuagaauguggguggcacagacccugauguccuggguagauggcuuuauuucu

SEQ ID NO: 2671 - RNA, 85 nt, Homo sapiens
uggcacauuccaccccagaagugacuguuggagagaugagaggaaaaaggcagagcagagcuagguggagaugugacacuucaga

SEQ ID NO: 2672 - RNA, 82 nt, Homo sapiens
acucugaucuuuuuuuaaaaaacacacaguggcagagucauuucacuauugcacuguguguuaaagaaugaauaaggaguuu

SEQ ID NO: 2673 - RNA, 106 nt, Homo sapiens
uguggagaccgcagucaguaacuuugugauauauggaauauuuagaggacaguaacccauuucccuacgcccuaccugaucacaucgugcccugcugggccauacc

SEQ ID NO: 2674 - RNA, 59 nt, Homo sapiens
uuucuuuauugcacauuuggggcuugggggauagagucagaugugugucaguugaaacu

SEQ ID NO: 2675 - RNA, 116 nt, Homo sapiens
uacuucgccuccacuucuguuccucccugcccuggugcugcuccaggucacauacucguccugagccggcuucagccuguccgcgcagaagucucccggagccauggccuaguacu

SEQ ID NO: 2676 - RNA, 143 nt, Homo sapiens
ugcuuaaugaagggagccagacacaagacgccacaugcucugugauuccguuuguaugaaauguucaaaguagaugaauccauagagacggagugcagauugauggucgcuagggcuugugggaaggggcacccgagagcagc

SEQ ID NO: 2677 - RNA, 72 nt, Homo sapiens
gcugcucuucuggcuggcaccgucaccccugcccgaccccaggccccgcgugugucccggacggagcagucc

SEQ ID NO: 2678 - RNA, 65 nt, Homo sapiens
uuucuucgaagacaccgccgcuuccacagcgaagggagcugcuccgggcacgucgcggagggagu

SEQ ID NO: 2679 - RNA, 70 nt, Homo sapiens
agugggguccuaacugucaaagcaggggacaccauuaggcuugaggcagggguuagaggcaaaccauucc

SEQ ID NO: 2680 - RNA, 129 nt, Homo sapiens
caccuccagccugggcgacagaaacagacucugucucagagaaaaaaaaaaaaaaagcgaaaaaacguuauuuauuuauuuauuuauuuagagacggagucuugcucaaguugcccaggcuggagugca

SEQ ID NO: 2681 - RNA, 80 nt, Homo sapiens
ugcgcgcaggggaggcagcgcagcccgugaacacccccgagcccggugcgggccgagcaguucuccgcaccuccgguaaa

SEQ ID NO: 2682 - RNA, 52 nt, Homo sapiens
aaguguuaaucucagugugacucauuugauuuccuguugacaugccauuucu

SEQ ID NO: 2683 - RNA, 64 nt, Homo sapiens
guuugcacagccuccgggagcuaccaauaugauagguuacauggggcagacugccuaccaauac

SEQ ID NO: 2684 - RNA, 88 nt, Homo sapiens
ggguugggcaaggugcggggcuagggcuaacagcagucuuacugaagguuuccuggaaaccacgcacaugcuguugccacuaaccuca

SEQ ID NO: 2685 - RNA, 60 nt, Homo sapiens
gcuucucugauugcucagacuauugcuugguugcuaaguagggagccacagaccuggucc

SEQ ID NO: 2686 - RNA, 109 nt, Homo sapiens
gcgagcggacccuccgaggcugcggccaggugggcggacaccccacgcugcagccccugcacggcgcucacugcccguuccccacagcuucgagaggcuucugcugcac

SEQ ID NO: 2687 - RNA, 119 nt, Homo sapiens
ggcuuucuugucacguacaaccucgggucggcuguuuacucagccaaggagagaagauagaguagggcugggaggcugagggcggacuggggcggaaauguggcagagaucccaguccc

SEQ ID NO: 2688 - RNA, 67 nt, Homo sapiens
agcuguguaaccuugggcaauuugcuucaacucugggucucagauuccuuauuauaaaguaagcuuu

SEQ ID NO: 2689 - RNA, 64 nt, Homo sapiens
gcuacaggcuaacacagggaaagagacagaaucuucuagucccuacaguuagucuaaguagcaa

SEQ ID NO: 2690 - RNA, 115 nt, Homo sapiens
ucuaacccuccugcucgaucucagagcucagacacagagcagcaauccccuacaaguggugggggaaaaguagcuccagcucaaccaucugaggaaggaccaggaaggaaagaug

SEQ ID NO: 2691 - RNA, 72 nt, Homo sapiens
aucuggagucugaaguagcuauaaagcagcuauaaaacagaaauacaugcauagcugcagaaaccaugauag

SEQ ID NO: 2692 - RNA, 59 nt, Homo sapiens
ggaguggacccgccacgggagcuuugucaauaagcccacgcggggcuggcugcauccca

SEQ ID NO: 2693 - RNA, 72 nt, Homo sapiens
uguuugggucuguuuacagggucuuggaugucggguucgaccacuuggccgaugggaauggucugucacagu

SEQ ID NO: 2694 - RNA, 148 nt, Homo sapiens
cagugaugaucgcaucacaguugagugaaauggccuuccuguucagcuguuagagacugaagauuguuagggcaccuuagaaugucucaucuuuucuagguugucaacagguacuauuugucacauaacuaacuuucgaggcacugga

SEQ ID NO: 2695 - RNA, 118 nt, Homo sapiens
aucaauaaauaaaaauauaucaccuuuuuggcucucugaccagcaccauggcaguuggcaagaacaagugccuuacgaaaggcggcaaaaagggagccaagaagaaagugguugauca

SEQ ID NO: 2696 - RNA, 60 nt, Homo sapiens
uguaaacgcuuucugauguacuacucaaacugauagaaaauauuuucaugaaacuacaug

SEQ ID NO: 2697 - RNA, 68 nt, Homo sapiens
gggaaacucagauguccaaacuaauuuuaacaaacgcauuaagagguuuauuuggguacauggcccgc

SEQ ID NO: 2698 - RNA, 75 nt, Homo sapiens
gguuuaaucaaaggaugugugguuugcuaaccuuggcaacaggcaaggccaauguagucuaaagucaaggacucu

SEQ ID NO: 2699 - RNA, 142 nt, Homo sapiens
ugguuuaaguuauuaauaguugaauugaaauuguggccaaggaugagaacucuaaucugauuuuaugugcuucugcugugauggauuaaaggauuuaccugaggccaaauugguaugcaggaauuuauuaaauggaaucaua

SEQ ID NO: 2700 - RNA, 73 nt, Homo sapiens
gaaugucauugagaugcuuguaggacagggaccgcuguccuacaagcaucucaaugacauucauucuguuccc

SEQ ID NO: 2701 - RNA, 73 nt, Homo sapiens
gaaugucauugagaugcuuguaggacagcggucccuguccuacaagcaucucaaugacauucauucuguuccc

SEQ ID NO: 2702 - RNA, 100 nt, Homo sapiens
gguacacuuuguuuuguacaggucaauggguuuugacaguguauauaaugacaugugucuaccauuguguaaugccacguaucugucauuacaguaccau

SEQ ID NO: 2703 - RNA, 112 nt, Homo sapiens
ccccugaaccuucuggaggaacaucuaaauguacacagcucuguuuuguagguauuaaagacuaccacagaggcuaugauugaggucaacauuaacaagaauuuagugggcu

SEQ ID NO: 2704 - RNA, 103 nt, Homo sapiens
uaguuuuuguagacaugggccacucugcuuaucaaguuucuguaugugcauuuaauagaggaaaacugaaaguaaguauauauuuuuuuuccagaagacuguu

SEQ ID NO: 2705 - RNA, 83 nt, Homo sapiens
ugcaggaggaagcuccuggccacggguccugcagagugacaguucuuccugaaguggacuccguaggcucuuccuccugcaau

SEQ ID NO: 2706 - RNA, 56 nt, Homo sapiens
cuagacuaggaggaagcuccuggccacagccucugacucaucuccuggcccugguu

SEQ ID NO: 2707 - RNA, 70 nt, Homo sapiens
gcagguucucccuugcaugcaagaugggugcuggcccacugugaggcuucugcucggggaaguucugugg

SEQ ID NO: 2708 - RNA, 61 nt, Homo sapiens
gggacccgccacgguuggccaagcucaggccauaugagcugggacuggcaggcaguuccug

SEQ ID NO: 2709 - RNA, 61 nt, Homo sapiens
gggacccgccgcgguuggccaagcucaggccauaugagcugggacuggcaggcaguuccug

SEQ ID NO: 2710 - RNA, 120 nt, Homo sapiens
uggcagacagaguaacaugagcugggacuggcaggcuagaagccucccauuggcugcuggugguccaagcuaugggcaaggagcugcagcugggacuggcacaggaaacacccugcuagg

SEQ ID NO: 2711 - RNA, 114 nt, Homo sapiens
uugcaacuuaagcuucauguaggucuuuauaauguguuuucuccuccuaccagaaagcaauaaaggagaaagagauuccuauugaaggacuggaguucaugggccauggcaaag

SEQ ID NO: 2712 - RNA, 126 nt, Homo sapiens
ccucuuggugggaggcuuugauugggaagcugggggaagguggcuagugggugggguucgggaguacuggggaccucucccaguguccuuccuccagccaguccuuggcagagagcugagaaggug

SEQ ID NO: 2713 - RNA, 98 nt, Homo sapiens
cugcagccugguagaauugggaagcugggggaaggguggucugagcacccccucauuccccucgugugacucucuuggauuauuuauguguugugguu

SEQ ID NO: 2714 - RNA, 61 nt, Homo sapiens
aguuugaauugggaagcugggggaaguuaaauaugagccacuggguguaccagugcauuaa

SEQ ID NO: 2715 - RNA, 63 nt, Homo sapiens
uccugucuagugcagaaagcaggcagugcccagcacagagcacauguauuagguaaauggacc

SEQ ID NO: 2716 - RNA, 63 nt, Homo sapiens
ccggacccagacugguagugaggcuuuggaccccgagccgcugcaaugccgcuggagcuggag

SEQ ID NO: 2717 - RNA, 84 nt, Homo sapiens
cggcccgcgcgccuagcgucaugggcgccacgcgccggaggggcggggcuacggcgccucggagggcucgcagaugcggccggc

SEQ ID NO: 2718 - RNA, 100 nt, Homo sapiens
agcugcgucuuugugcuuucagcuucuuuacagugcugccuuguagcauucaggucaagcagcauuguacagggcuaugaaagaaccaagaaugggcugc

SEQ ID NO: 2719 - RNA, 80 nt, Homo sapiens
aucuaaagaugaaaaaggacaggaaauguggaaaaugaaaucuggauucugcguguucuguuguuugccucccugggucu

SEQ ID NO: 2720 - RNA, 100 nt, Homo sapiens
aggguguggugaggauuuggugaacuggugcccaccgaggguggugaagaaccuugguauacaguaagugcucacuaaauccuggcggcuaggauccuca

SEQ ID NO: 2721 - RNA, 121 nt, Homo sapiens
cuucugccuacucgguccagcaggcucugcuuggcugaugcucccggcccagaucccacgccugccaagggcgggucaggugcagagcagcaaggggugugagagcgagugagcuggggau

SEQ ID NO: 2722 - RNA, 77 nt, Homo sapiens
ccacugagagcgggacgcggggcuaggucagaguaggaaggagucgcugagcugaaucuuuguggaguggagugggg

SEQ ID NO: 2723 - RNA, 56 nt, Homo sapiens
gcugccgcgcuggcauuuucuccuggacaaggagagagugcggcugcugagagccg

SEQ ID NO: 2724 - RNA, 104 nt, Homo sapiens
ugcucuccucucagaagcugcagccgugauggaaguuugaauguugagccgcugugaggcgaggccgggcucaggcgagggagaugagagacagagacggcggc

SEQ ID NO: 2725 - RNA, 54 nt, Homo sapiens
cugggcagccgcggguaaaggccuagcgggcuugauaaccccugcgcccuggcu

SEQ ID NO: 2726 - RNA, 63 nt, Homo sapiens
ccaggcuuucuuccccacucccccaggcccaagcccagcugggacucaggaaggcuucuggaa

SEQ ID NO: 2727 - RNA, 59 nt, Homo sapiens
gcugggguguuuguuuggacuggagaagggaggcggcgggcgaagcgcacgucgagcgg

SEQ ID NO: 2728 - RNA, 57 nt, Homo sapiens
agggcuaugacaugcuagaggaucccaaguucccugagggcaucuacacagaucuga

SEQ ID NO: 2729 - RNA, 128 nt, Homo sapiens
ggccuuuucacagaggguuuuguaaucuagcuucccuuuuucaagggaugauuguucugcuuuguggagaguagagaacagaauguaggaguggaagauuggaagcggaaagaucaguaagaggcuaa

SEQ ID NO: 2730 - RNA, 58 nt, Homo sapiens
gcucgcgacuggagggcggaacuccgggcuggagucccggaagccccuguggcagcuu

SEQ ID NO: 2731 - RNA, 60 nt, Homo sapiens
gugcccgucugcuggggcaaaggagccuguccuguguuugaauguggcaacguggugcuc

SEQ ID NO: 2732 - RNA, 52 nt, Homo sapiens
caccaagucuggcaggucugcucaccagguggcuagauaccgcccacgugcc

SEQ ID NO: 2733 - RNA, 69 nt, Homo sapiens
ggcgagggaccuggcccuggccauccgggacagugagcgacagggcaaggcccagguggagauugucac

SEQ ID NO: 2734 - RNA, 120 nt, Homo sapiens
cccggagaauguauccauugagacgcucgcuguuuguauccauugaggagcugccucgcgcagggggugugcgaggcugaguccaagagauagcaaaucgagucuuaaauaauccgggga

SEQ ID NO: 2735 - RNA, 60 nt, Homo sapiens
gcgcggcggcaacagcagacaugucggggguccggggccugucgcggcugcugagcgcuc

SEQ ID NO: 2736 - RNA, 64 nt, Homo sapiens
cuguccugcugggacagucaugggacugcaucuucguccuuguccacagcagaugaggacagug

SEQ ID NO: 2737 - RNA, 103 nt, Homo sapiens
uugcuaaguacgaccugaaaaucugaugcaaacuccgacacuugugggcugagcccagcaguguccagcaguuugcaaggaauagccgcggcucugggcaguu

SEQ ID NO: 2738 - RNA, 74 nt, Homo sapiens
ccuccucauccugggcugggcuuuuccucuuggcacacagugguguggggagaaacagcuuuggaugugaggcc

SEQ ID NO: 2739 - RNA, 106 nt, Homo sapiens
ugauccucgugauaugaggaacuggcuuccccagagcaaguggucuuagaagaagagagcaagcaggaagccacagugccuuuaucacuuggccucugacaucaca

SEQ ID NO: 2740 - RNA, 72 nt, Homo sapiens
uggaauugaagaggaagaugaugaugauaaugaaauugaugaugaugauacaauuucugacuggaaucuaag

SEQ ID NO: 2741 - RNA, 72 nt, Homo sapiens
uggaauugaagaggaagaugaugaugauaaugaaauugauggugaugauacaauuucugacuggaaucuaag

SEQ ID NO: 2742 - RNA, 90 nt, Homo sapiens
ugaugaagauggaauugaagaggaagaugaugaugaugaugaaauugaugaugaugauacaauuucugacuggaaucuaaguaagucaga

SEQ ID NO: 2743 - RNA, 120 nt, Homo sapiens
ggugcacgugcgcaguagcggcggccacgccucuuccgcccgcccucucccagccugcccgcuugaucgccggcuguuggcggagaugagaugccgcugcacgguguuuguccguacuac

SEQ ID NO: 2744 - RNA, 74 nt, Homo sapiens
gcuccccacaggacuuggacagagggcccacagggggaugggcuggcuguggccagguuuagggcagggggcau

SEQ ID NO: 2745 - RNA, 60 nt, Homo sapiens
gcaggauguggggaugcugcagcucauugaguugagaugggguccugauagucacugcag

SEQ ID NO: 2746 - RNA, 105 nt, Homo sapiens
gccuaguaaaaaaucagaaaaaauguaugcagagcaguuuucaaugacuuccaagaugccugcaggauguggggaugcugcuguggcugagugagucugugguca

SEQ ID NO: 2747 - RNA, 53 nt, Homo sapiens
ugcugucguccacgcccugcuggaccggccuuaggggugaaggugggggcaca

SEQ ID NO: 2748 - RNA, 123 nt, Homo sapiens
cauccguuaugccucggucaucagcaugguugucacggucucucuggcucacgggcugcugcggcucacagccuucccucacuugccugcaaccagcugagagccucccuggugauggguguu

SEQ ID NO: 2749 - RNA, 85 nt, Homo sapiens
gccaugaucaucccuguacgcugcuucacuuguggcaagaucgucggcaacaagugggaggcuuaccuggggcugcugcaggccg

SEQ ID NO: 2750 - RNA, 91 nt, Homo sapiens
gugaccgugcguguaaagggugaggcguauggagcuguggcggggcggaaguucacaugugugguauguagagcacauguuaugguuauca

SEQ ID NO: 2751 - RNA, 74 nt, Homo sapiens
gggauucugaaaaguucgugagcugaaacaaauaaauugaguuggaagauucauguugacuguuuguaucccaa

SEQ ID NO: 2752 - RNA, 65 nt, Homo sapiens
gcgcgaggaacuggagcccggcuggcccccgccuccgccuccgccccccggccccagcugcgcgg

SEQ ID NO: 2753 - RNA, 105 nt, Homo sapiens
gguggggcgcugcaggcuagccucacugcccuguauuccacgcucacagggaguccugaccugggggcuguggagcugcgcaucgaagagcugcggcaccacuuc

SEQ ID NO: 2754 - RNA, 56 nt, Homo sapiens
uuugcgggcgcucgcgguaaguuugcgccaagugcgcggcagccgggacgcagacg

SEQ ID NO: 2755 - RNA, 159 nt, Homo sapiens
uccuaauaaugggccuuccucacucugaaaacuauuuuuuuuuuggcggcgggugcggggguaauggaauguuucugauaugguuuggaucuguguccccaccuaaaucucgucuugaauuguaaucccaaugugucaagggagggaccuggugggagg

SEQ ID NO: 2756 - RNA, 124 nt, Homo sapiens
gcagggaccauucuggaaguaccucuucacccuggggucauucaggaaggagacagucucuggaaucagucacuucccuuccugaagggccagcuggguggaggaacggagcugccaccugcug

SEQ ID NO: 2757 - RNA, 108 nt, Homo sapiens
gccuucucuccuucccgcccucaggguccacggccaccauggcguaucaggggcagcaguaccuguggcagcauuggccuuugcagcggcggcagcagcaccaggcuc

SEQ ID NO: 2758 - RNA, 63 nt, Homo sapiens
cggccgaggaggagaacauggcggccgcggagagcggcugaaaugccuguucuucaggccggg

SEQ ID NO: 2759 - RNA, 73 nt, Homo sapiens
ugucuuccuguagggccuccucuaagucuugagcccgcaguuccugagagaagaacccugaggaacagacguu

SEQ ID NO: 2760 - RNA, 84 nt, Homo sapiens
ugcgggaccuccccuaagucuugagaccucaguuucugagagaagaacccugaggaacagacguucccuggcggcccuggcgcc

SEQ ID NO: 2761 - RNA, 167 nt, Homo sapiens
cagagaggggagaaaggagauuugccucugcuuguuauccggagcuguaggugaacuguucugcugcugguaauugaagucuaucugcagaacaguuaucaagggcaguaaccuuuuuucuagcaauggccucagauaaaacuuguuuuucuuauuaauaauuuguu

SEQ ID NO: 2762 - RNA, 75 nt, Homo sapiens
uucaaaacaaaggauuauuuguaucuguuacaguugggaucugcccagguagagggguccuaccaaucuuggaau

SEQ ID NO: 2763 - RNA, 106 nt, Homo sapiens
ugcccggugcccgaggaggcagccaagcucguagccugccacuccgugcgugaguacggggcgcgggccggggguugggaggucguagucccugggucccugcauc

SEQ ID NO: 2764 - RNA, 106 nt, Homo sapiens
ugcccggugcccgaggaggcagccaagcucguggccugccucugcgugcgugaguacggggcgcgggccggggguugggaggucguagucucugggucccugcauc

SEQ ID NO: 2765 - RNA, 180 nt, Homo sapiens
gauccagcaucaggccaacagcagacaccccauuucugcucccaguccucgugcagcuuaguggcgcaguggcggcagcagcaugagcaccccccggccugcuccaccacagccaggcgcugcugagggggcuggaggcccagaagggaagguaugcgcucgggacccugggggggucgg

SEQ ID NO: 2766 - RNA, 57 nt, Homo sapiens
ggcggccgcggggcggggcggagcacucggcggagccgcucugccugcguccgcucu

SEQ ID NO: 2767 - RNA, 59 nt, Homo sapiens
ugcgccugcgcaaauuguaggucaagcuugggccgggguuaggguugcacacgcguaaa

SEQ ID NO: 2768 - RNA, 63 nt, Homo sapiens
cccuguaaauuauuuuuguuccagguacgguggcucaccccuguaauuucaauacuuugggag

SEQ ID NO: 2769 - RNA, 85 nt, Homo sapiens
uggauggcugguguggcuucuugggggaggguaggcaggugggccccagcucuucucaucccugucggccgcaggcauguccaac

SEQ ID NO: 2770 - RNA, 53 nt, Homo sapiens
uaaaauaaguuauugcaucugacauacuuugucaguuugucaacagcuuugaa

SEQ ID NO: 2771 - RNA, 56 nt, Homo sapiens
uaccugcuucuuucugccucugaagcaaguuucacugagcggugguagcaggugcc

SEQ ID NO: 2772 - RNA, 88 nt, Homo sapiens
gcaguagcagccuguauguacuggucuuguuugccaaaguaauacaguuaaauagauuaaaaaugcaaauaguacugugauacuguga

SEQ ID NO: 2773 - RNA, 68 nt, Homo sapiens
uuuagacugucuuugcuucaucaucugaagguaaaauuuuccagauacggcagacggcuuucagagua

SEQ ID NO: 2774 - RNA, 121 nt, Homo sapiens
gugcgcagaggcuacugggggaacaagaucggcaagccccacacugucccuugcaaggugacaggcugcugcggcucugugcugguacgccucaucccugcacccaggggcacuggcaucg

SEQ ID NO: 2775 - RNA, 60 nt, Homo sapiens
cggcaagccccacacugucccuugcaagguaggcugguggcaggugaugggccugccgug

SEQ ID NO: 2776 - RNA, 61 nt, Homo sapiens
aucggcaagccccacacugucccuugcaaggugacaggccgcugcggcucugugcuggugc

SEQ ID NO: 2777 - RNA, 72 nt, Homo sapiens
uucggcagcucccauacuggugggagaggcaaacuugcagucugcucaucuuaagauggugaauguugagau

SEQ ID NO: 2778 - RNA, 93 nt, Homo sapiens
ccugcugccuggagaagcugccugggaugggcucuggauuucucuguggagggggcugggagggcuggaaugggaggagucaggagcugggcu

SEQ ID NO: 2779 - RNA, 147 nt, Homo sapiens
gaguuauuggaguguuuugagcagagcuguuguguagucggauuauucuggcugcuggacugucauagacuguuggaggccaaggguggaaacaguaauaggagucaggagcuggggcauucugggugagagaugacaguggcuugg

SEQ ID NO: 2780 - RNA, 111 nt, Homo sapiens
ugcccagagccacacugccuggcucucuugaagggccugggcuugccgccugcacuuccagggcagccaacagcccauaggagucaggagcugggaggugggaggggcaua

SEQ ID NO: 2781 - RNA, 105 nt, Homo sapiens
cccucauccugacccuugugcagauagcccgggucaucuuggaguauauugaccacaagcucagaggugagucuggagucggaguaggagucaggagcuggggaa

SEQ ID NO: 2782 - RNA, 137 nt, Homo sapiens
aagcaggcaggcuagacucagcacacccuggaccucacucacaaccaagcaucccagagcccacugggccucccuuuggaagcugacagacuggaaggagucaggagcuggguuccaaagcuaauagagccucuuac

SEQ ID NO: 2783 - RNA, 84 nt, Homo sapiens
ugagggugagggcacccaggcacccugaggcauggacacucuucugaggccuggguccugggaccugcguccguuccccucaca

SEQ ID NO: 2784 - RNA, 101 nt, Homo sapiens
cugggcaccgggagccucuucggcccuccuccagcccagcauacaggaagugcuccguaagugucugaucaggugaaugagugaaagguacccucccagca

SEQ ID NO: 2785 - RNA, 59 nt, Homo sapiens
gaugucaucugccagggauuuccagaaagagcucucagauugccucaaaaacacauugg

SEQ ID NO: 2786 - RNA, 54 nt, Homo sapiens
ucggauaugcuuuaacucugaguuggcccgcaugcucugaguuaaaauuugaac

SEQ ID NO: 2787 - RNA, 71 nt, Homo sapiens
gcauuuauucugguaaauauaauuaaaugguuaguuaauaaaaaguaauuaugcucugaguuaaaauguaa

SEQ ID NO: 2788 - RNA, 61 nt, Homo sapiens
auaaugguuauuauuuauugagcauuuacaugugucaugcucugaguuaaaauuuuuauau

SEQ ID NO: 2789 - RNA, 98 nt, Homo sapiens
uugcuguauacacauuuugccucucuauucaacgaauucuuaugcccucuuguggugauuuuaaugugcggaagggaaacaauagaaauuuugcaauu

SEQ ID NO: 2790 - RNA, 57 nt, Homo sapiens
guuggugaguuugucaagcaacuaucgacuugaucaguucagccaagcaacugacaa

SEQ ID NO: 2791 - RNA, 77 nt, Homo sapiens
gcucggagggugcguggccuucucgcagcgcggggcuucccuugaggccacgcggcggggggaggcaccgcuggcaa

SEQ ID NO: 2792 - RNA, 152 nt, Homo sapiens
ucccgccgcugccgccgccgccgccgccucccgcucccgccgccgcgacccgcgggaaggcgccugcgcacugcgcgcugcggugggggcgggggcgucccgccgcggcccgggagcggggggcgcgcggcacguggcgcucgagugggagg

SEQ ID NO: 2793 - RNA, 133 nt, Homo sapiens
ucugggccugcgcaugcgcgccacggacgaggcaggccgggugccugggccugggagccauaagccggagagucuggcgggcuaagcucagcggcauccggguuccuuguggccgccgcagcagcucgagaac

SEQ ID NO: 2794 - RNA, 132 nt, Homo sapiens
aagaguaaccaguggaaaauaccagcguccauuuggaggacuugcuggcucagauugaacagcucugucacagcugcuagccacauccucugaggggucucuguguugaaauugguuguugauguuucuuuu

SEQ ID NO: 2795 - RNA, 115 nt, Homo sapiens
gcugcccgccgcggggccccaggcgcagcacgcucucgcgcgugggccgcagcuggcagcacaggaaguccagguggaagagcggcggcgugggcggcccggcgcggcgcggcga

SEQ ID NO: 2796 - RNA, 71 nt, Homo sapiens
guggguugagcugcugugaggauuaaaugaagcauugcuugcaaggucauguuaccaaagcagucccacag

SEQ ID NO: 2797 - RNA, 64 nt, Homo sapiens
cugacagacuuguaaguggaguuggaaagaugguugucucuucagugcuuccaaccugucagag

SEQ ID NO: 2798 - RNA, 55 nt, Homo sapiens
ggaggcugcuuggcccaggggcucauauagccuuuucugagcacagcgccuucag

SEQ ID NO: 2799 - RNA, 77 nt, Homo sapiens
cuaauacaauuaaguuaaaaacaagguacuuuaccuucauguguugccuccuguuuguuuuuaguuuguuauuggga

SEQ ID NO: 2800 - RNA, 102 nt, Homo sapiens
accagaggaagggcacagcuguaaggaacuuagggaaacagugaagucuauuuagguucuuccuuuuuuuuuucuucuuuuuuuuuuuugccaaucugguaa

SEQ ID NO: 2801 - RNA, 57 nt, Homo sapiens
ucaaaggguuuccuggcaauaaaagaguuuuugugaaugacuacagcaucuuugaga

SEQ ID NO: 2802 - RNA, 55 nt, Homo sapiens
ccaucgugcauuggcuaccugggccacugcguggccagggcucagagcacuggga

SEQ ID NO: 2803 - RNA, 57 nt, Homo sapiens
caguguuauaaccuuugaagauggcuacagacuaacaccagggcucagagcacugcu

SEQ ID NO: 2804 - RNA, 58 nt, Homo sapiens
gaagggcucagagcacugcgcauguauaagaugagauuagggagcugggguauuuccu

SEQ ID NO: 2805 - RNA, 158 nt, Homo sapiens
agucaggccugcggggcugagccguucugccuucgucuggccucacacagggcucagagcacugccccaacccucccccaaccaggaaaagcagugcaagcugaguccagaagguucucaggguuugaguggcacagcagcuguugaacaacugcuua

SEQ ID NO: 2806 - RNA, 76 nt, Homo sapiens
cuuccugauggcacaucggcacugagacacuccuugugauuuuucauagcugcguucucucccacgguagggagaa

SEQ ID NO: 2807 - RNA, 130 nt, Homo sapiens
cugcugcugccaacauuggcccugcucaggcagcagcggucccaggaugccaggcuguccuggcuugcuggccuccagcaccgaguggcauggggggcccuggucugggcagccaccuggcagcggcgga

SEQ ID NO: 2808 - RNA, 99 nt, Homo sapiens
agagcacccauguauucaagcacuacuagauucuuauauccaacaacaacaacaaaacaguuauugggaaccuacugugggccaggcaauuuguucuga

SEQ ID NO: 2809 - RNA, 82 nt, Homo sapiens
gacaaaccucacgagugucacaaagaaccgugcagauaagguaaauggugccguuuguggcaugugaacucaggcgugucag

SEQ ID NO: 2810 - RNA, 60 nt, Homo sapiens
cucaucccgguccagacccagcaccccauacggaagggucugcaucacaagguaagagcc

SEQ ID NO: 2811 - RNA, 84 nt, Homo sapiens
ccuccuggacaaggcggcuggcugggcagggggcugacccccccaccccccucccggacgggucggcugccgggcagagaggcu

SEQ ID NO: 2812 - RNA, 73 nt, Homo sapiens
ggauguacgagggcuucugggggagcugccagcaggaaagggagggugcugugggagccagguuuucaucucc

SEQ ID NO: 2813 - RNA, 125 nt, Homo sapiens
ggaguuggcagcccuggugucugcgcucuaauuagacuauugcugugacaagcucuuggcuguguucucagcuucccagcuugguccccggugcugugggagccagguuuucuagccuacuucuu

SEQ ID NO: 2814 - RNA, 95 nt, Homo sapiens
agggacugcagaagccauggcuccauugcaagccgguccccaaggcucaggaaagcugcccggggcggguggagucucaucuguguguacccuac

SEQ ID NO: 2815 - RNA, 63 nt, Homo sapiens
cugauucacuuuucauccuuuccuuguuuguuuagacuggaccaagaggauugaguaccagcc

SEQ ID NO: 2816 - RNA, 83 nt, Homo sapiens
uaauuucauacaagaauugacugauguugaccuuaagaaauuauuacucauauacaauguacauuaguuccuaugacauuagc

SEQ ID NO: 2817 - RNA, 109 nt, Homo sapiens
gaauugacugauguugaugauuuuaaaagugaaaccauaugccaaauugccucucaagagcuaagaaauaaacucccgcugauguucucucagccuuugucuuguuuga

SEQ ID NO: 2818 - RNA, 61 nt, Homo sapiens
gugaguugcuggacaccgcguugggguuggagcauugacugauguugagcaaacuccgcac

SEQ ID NO: 2819 - RNA, 86 nt, Homo sapiens
gauauuugcauuuuccuauugacugauguugagcacguuuucaugugcuuauuugguauccaguuaucuucuuugguauauauuug

SEQ ID NO: 2820 - RNA, 56 nt, Homo sapiens
uauagauaauugacugauguugaaacucaagcccaauuuauagaugauucugugua

SEQ ID NO: 2821 - RNA, 56 nt, Homo sapiens
aggcccaucucagccccugugaaacugcaccucauccuacagggcuaugaaccuac

SEQ ID NO: 2822 - RNA, 88 nt, Homo sapiens
gggcaguccucacugaccuccgugcaugcggucuccuguccacugccuguugcagaggcuguucccuggaugguccucacugaccucu

SEQ ID NO: 2823 - RNA, 97 nt, Homo sapiens
ggcaguagccaaacagugguugccggggccuugagcaagacucagugcugugcuggcuucagguuugacccugugcaguuccaguggugguggccaa

SEQ ID NO: 2824 - RNA, 94 nt, Homo sapiens
cggcggcggcggcggaggcgggggcggggguggugggggcggcaggaaauccuccuccgccgccgccuccuccuccgccuccuccuccucggcg

SEQ ID NO: 2825 - RNA, 103 nt, Homo sapiens
ugccuugggcgggcggcuguuaagacuugcagugauguuuaacuccucuccacgugaacaucacagcaagucugugcugcuucccgucccuacgcugccuggg

SEQ ID NO: 2826 - RNA, 105 nt, Homo sapiens
gaacuuuggccaccuggcacugagaacugaauuccauaggcugugagcucuagcaaugcccuguggacucaguucuggugcccggcagugcuacaacaucaaugc

SEQ ID NO: 2827 - RNA, 111 nt, Homo sapiens
ucuugucugcucccccucuugaauccuuggaaccuaggugugagugcuauuucagugcaacacaccuauucaaggauucaaagaggcugagccuugucuacauguagaagg

SEQ ID NO: 2828 - RNA, 111 nt, Homo sapiens
ugccggcgagcgccugcgcccuucccuggcgugaggguaugugccuuuggacuacaucguggaagccagcaccaugcaguccaugggcauauacacuugccucaaggccua

SEQ ID NO: 2829 - RNA, 105 nt, Homo sapiens
agaaauccuacucggauggauauaauacaaccugcuaaguguccuagcacuuagcagguuguauuaucauuguccgugucuauggcucucgucuaccagacuuua

SEQ ID NO: 2830 - RNA, 111 nt, Homo sapiens
cgccacgaauggcuaugcacugcacaacccuaggagagggugccauucacauagacuauaauugaauggcgccacuaggguugugcagugcacaaccuacacaacuguacu

SEQ ID NO: 2831 - RNA, 105 nt, Homo sapiens
gaauuguugguguuagcccugcggccccacgcaccaggguaagagagacucucgcuuccugcccuggcccgagggaccgacuggcugggccugccuucugcccag

SEQ ID NO: 2832 - RNA, 101 nt, Homo sapiens
gagcgggcgggcggcggcggcggcagaguaggcccuuccucaggccgggagaaggcggcggcggagcggcggcugugcggccccgggcuccguguguucgg

SEQ ID NO: 2833 - RNA, 109 nt, Homo sapiens
ucucuuucaccuccuuuucucuuuccaggagaggaaauuugugggcggaucuggucaagugagugagcggauaauggaccuccuuggagaccgagugaagcuggagagg

SEQ ID NO: 2834 - RNA, 83 nt, Homo sapiens
gcggcugcaguggcggcugcagaaagcguggagugaauggaccagagaccgagccgcgcugcugccgccgccgccgccgccgc

SEQ ID NO: 2835 - RNA, 100 nt, Homo sapiens
uuaugaacaaugucuuuguaguucuugcggcugugugaacuaguuuaucucugauuaagguucaugcugcauuuccugcuauauaugaacauuguccuga

SEQ ID NO: 2836 - RNA, 71 nt, Homo sapiens
cacagcucuuguccuggugugcuagaguucucgaugaaucuacuggucuugauucacuggcaggagcagug

SEQ ID NO: 2837 - RNA, 108 nt, Homo sapiens
cagaauugucacccccaaguguuaugggcccggagcgaagacaguaguacucccgagcgggaggaugauuucucggagguugguagagguuucuuggagguuguuuug

SEQ ID NO: 2838 - RNA, 63 nt, Homo sapiens
uagauaacauuguaaagcgcuucuuucgcgguugggcuggagcaacucuuuacaauguuucua

SEQ ID NO: 2839 - RNA, 107 nt, Homo sapiens
uggugugcucacccucagucugcagcagcucgaagcccuccugaugagagccgacacaggcaggggccagagucgcuuuugcagcgcuggaaggcugaguucugcca

SEQ ID NO: 2840 - RNA, 66 nt, Homo sapiens
acgaagcacuuccccgaguucaggugaauuggaugcagugucccuguuagucaugggcuguuuugu

SEQ ID NO: 2841 - RNA, 82 nt, Homo sapiens
aucuuggaaggcucugaaccucagaaaggauucacaguaaguuaaccauguagaucugagaggagaguagcuucuuguagau

SEQ ID NO: 2842 - RNA, 110 nt, Homo sapiens
gcaaacugugucucaggaagcagccccuauccuggaaugccggucgauucuaaguucuacaagaugaucaaggaaggcuuccggaugcucagcccugaacacgcaccugc

SEQ ID NO: 2843 - RNA, 108 nt, Homo sapiens
gguggugguggagguggaggagguggagguaaugcagauaucccuguggaggaaaagggggacaaucaguauucaccuccacagcugcccugcacacacgcugcugcu

SEQ ID NO: 2844 - RNA, 81 nt, Homo sapiens
aagcagaaugaugucguccgaauucuccccugcaaguaugucaacuucauuuguuugagaaagaaugauauuaaugugcuu

SEQ ID NO: 2845 - RNA, 110 nt, Homo sapiens
cggccgggccggggcagccgggaagcggguggggugguguguuacccaguagcuccugggacaucgcucggguacgcuccacgccgucgcagccacugcuguggucgccg

SEQ ID NO: 2846 - RNA, 75 nt, Homo sapiens
aacagcaugauggcauuugaugcuuggauuuaauguuaguuucagggagacaaaauggagugcuagagggcuguu

SEQ ID NO: 2847 - RNA, 60 nt, Homo sapiens
gccgaccugcagacuggggccuaaguuucuuuuaguuuccggugucucugcaauggcggc

SEQ ID NO: 2848 - RNA, 106 nt, Homo sapiens
cagcagaggggaaauuguggucauuggugcuacgaacaggcuagauucuauagauccugcuuuacgaaggccuggucgcuuugauagagaauuccucuuuagccug

SEQ ID NO: 2849 - RNA, 69 nt, Homo sapiens
cccgggacgcggcggagcccggggacagcggggacgccgcccaguccuccgggugagccgccccugagg

SEQ ID NO: 2850 - RNA, 79 nt, Homo sapiens
gaaucacccuaacaagccgcaacguaaaauccuuggaaaagggucagugcauucguuaugcgggggggagggggaauug

SEQ ID NO: 2851 - RNA, 89 nt, Homo sapiens
gcacuuggugauaaacguuuucuaaauuuuuaguuaaguauauggauaaaaaguuaugaacuauuaaaaaugugauguggaccaaaggc

SEQ ID NO: 2852 - RNA, 23 nt, Homo sapiens
cccccacaaccgcgcuugacuag

1.-64. (canceled)

65. An isolated nucleic acid that
(a) comprises a nucleotide sequence having an identity of 90% or more to the nucleotide sequence of any one of SEQ ID NOs: 1 to 1336, or
(b) hybridizes under stringent conditions with a strand complementary to a nucleic acid consisting of the nucleotide sequence of any one of SEQ ID NOs: 1 to 1336.

66. The isolated nucleic acid of claim 65, wherein the nucleic acid consists of the nucleotide sequence of any one of SEQ ID NOs: 1 to 1336.

67. An isolated nucleic acid that
(a) consists of a nucleotide sequence having an identity of 80% or more to the nucleotide sequence of any one of SEQ ID NOs: 1337 to 2851, or
(b) hybridizes under stringent conditions with a strand complementary to a nucleic acid consisting of the nucleotide sequence of any one of SEQ ID NOs: 1337 to 2851.

68. The isolated nucleic acid of claim 67, wherein the nucleic acid consists of the nucleotide sequence of any one of SEQ ID NOs: 1337 to 2851.

69. An isolated nucleic acid consisting of a nucleotide sequence complementary to
(a) the nucleic acid of claim 65, or
(b) a nucleic acid that
(b1) consists of a nucleotide sequence having an identity of 80% or more to the nucleotide sequence of any one of SEQ ID NOs: 1337 to 2851, or
(b2) hybridizes under stringent conditions with a strand complementary to a nucleic acid consisting of the nucleotide sequence of any one of SEQ ID NOs: 1337 to 2851.

70. An isolated double-stranded nucleic acid consisting of
(i) a first strand nucleic acid, which is
(a) the nucleic acid of claim 65, or
(b) a nucleic acid that
(b1) consists of a nucleotide sequence having an identity of 80% or more to the nucleotide sequence of any one of SEQ ID NOs: 1337 to 2851, or
(b2) hybridizes under stringent conditions with a strand complementary to a nucleic acid consisting of the nucleotide sequence of any one of SEQ ID NOs: 1337 to 2851, and
(ii) a second strand nucleic acid consisting of a nucleotide sequence complementary to the nucleotide sequence of the first strand nucleic acid.

71. A vector comprising a nucleic acid operably linked to a promoter, wherein the nucleic acid is selected from the group consisting of
(a) the nucleic acid of claim 65,
(b) a nucleic acid that
(b1) consists of a nucleotide sequence having an identity of 80% or more to the nucleotide sequence of any one of SEQ ID NOs: 1337 to 2851, or
(b2) hybridizes under stringent conditions with a strand complementary to a nucleic acid consisting of the nucleotide sequence of any one of SEQ ID NOs: 1337 to 2851,
(c) a nucleic acid consisting of a nucleotide sequence complementary to the nucleic acid of (a),
(d) a nucleic acid consisting of a nucleotide sequence complementary to the nucleic acid of (b),
(e) a double-stranded nucleic acid consisting of the nucleic acid of (a) and the nucleic acid of (c), and
(f) a double-stranded nucleic acid consisting of the nucleic acid of (b) and the nucleic acid of (d).

72. A cell comprising
(a) the nucleic acid of claim 65,
(b) a nucleic acid that
(b1) consists of a nucleotide sequence having an identity of 80% or more to the nucleotide sequence of any one of SEQ ID NOs: 1337 to 2851, or
(b2) hybridizes under stringent conditions with a strand complementary to a nucleic acid consisting of the nucleotide sequence of any one of SEQ ID NOs: 1337 to 2851,
(c) a nucleic acid consisting of a nucleotide sequence complementary to the nucleic acid of (a),
(d) a nucleic acid consisting of a nucleotide sequence complementary to the nucleic acid of (b),
(e) a double-stranded nucleic acid consisting of the nucleic acid of (a) and the nucleic acid of (c),
(f) a double-stranded nucleic acid consisting of the nucleic acids of (b) and the nucleic acid of (d), or
(g) a vector comprising a nucleic acid operably linked to a promoter, wherein the nucleic acid is selected from the group consisting any one of (a) to (f).

73. A composition comprising
(i) a nucleic acid selected from the group consisting of
(a) the nucleic acid of claim 65,
(b) a nucleic acid that
(b1) consists of a nucleotide sequence having an identity of 80% or more to the nucleotide sequence of any one of SEQ ID NOs: 1337 to 2851, or
(b2) hybridizes under stringent conditions with a strand complementary to a nucleic acid consisting of the nucleotide sequence of any one of SEQ ID NOs: 1337 to 2851,
(c) a nucleic acid consisting of a nucleotide sequence complementary to the nucleic acid of (a),
(d) a nucleic acid consisting of a nucleotide sequence complementary to the nucleic acid of (b),
(e) a double-stranded nucleic acid consisting of the nucleic acid of (a) and the nucleic acid of (c), and
(f) a double-stranded nucleic acid consisting of the nucleic acid of (b) and the nucleic acid of (d), and
(ii) a carrier therefor.

74. A composition comprising
(i) a substance that promotes or suppresses the expression or function of a nucleic acid selected from the group consisting of
(a) the nucleic acid of claim 65,
(b) a nucleic acid that
(b1) consists of a nucleotide sequence having an identity of 80% or more to the nucleotide sequence of any one of SEQ ID NOs: 1337 to 2851, or
(b2) hybridizes under stringent conditions with a strand complementary to a nucleic acid consisting of the nucleotide sequence of any one of SEQ ID NOs: 1337 to 2851,
(c) a nucleic acid consisting of a nucleotide sequence complementary to the nucleic acid of (a),
(d) a nucleic acid consisting of a nucleotide sequence complementary to the nucleic acid of (b),
(e) a double-stranded nucleic acid consisting of the nucleic acid of (a) and the nucleic acid of (c), and
(f) a double-stranded nucleic acid consisting of the nucleic acid of (b) and the nucleic acid of (d), and
(ii) a carrier therefor.

75. A composition comprising
(i) a substance that suppresses the expression of a target gene of a nucleic acid selected from the group consisting of
(a) the nucleic acid of claim 65,
(b) a nucleic acid that
(b1) consists of a nucleotide sequence having an identity of 80% or more to the nucleotide sequence of any one of SEQ ID NOs: 1337 to 2851, or
(b2) hybridizes under stringent conditions with a strand complementary to a nucleic acid consisting of the nucleotide sequence of any one of SEQ ID NOs: 1337 to 2851,
(c) a nucleic acid consisting of a nucleotide sequence complementary to the nucleic acid of (a),
(d) a nucleic acid consisting of a nucleotide sequence complementary to the nucleic acid of (b),
(e) a double-stranded nucleic acid consisting of the nucleic acid of (a) and the nucleic acid of (c), and
(f) a double-stranded nucleic acid consisting of the nucleic acid of (b) and the nucleic acid of (d), and
(ii) a carrier therefor.

76. A composition comprising
(i) a nucleic acid selected from the group consisting of
(a) the nucleic acid of claim 65, wherein the SEQ ID NO is any one of 1, 8, 21, and 36,
(b) a nucleic acid that
(b1) consists of a nucleotide sequence having an identity of 80% or more to the nucleotide sequence of any one of SEQ ID NOs: 1337, 1352, 1372, and 1390, or
(b2) hybridizes under stringent conditions with a strand complementary to a nucleic acid consisting of the nucleotide sequence of any one of SEQ ID NOs: 1337, 1352, 1372, and 1390,
(c) a nucleic acid consisting of a nucleotide sequence complementary to the nucleic acid of (a),
(d) a nucleic acid consisting of a nucleotide sequence complementary to the nucleic acid of (b),
(e) a double-stranded nucleic acid consisting of the nucleic acid of (a) and the nucleic acid of (c), and
(f) a double-stranded nucleic acid consisting of the nucleic acid of (b) and the nucleic acid of (d), and
(ii) a carrier therefor.

77. A composition comprising
(i) a substance that promotes or suppresses
(A) the expression or function of
(a) the nucleic acid of claim 65, wherein the SEQ ID NO is any one of 1, 8, 21, and 36,
(b) a nucleic acid consisting of a nucleotide sequence having an identity of 80% or more to the nucleotide sequence of any one of SEQ ID NOs: 1337, 1352, 1372, and 1390, or
(c) a nucleic acid that hybridizes under stringent conditions with a strand complementary to a nucleic acid consisting of the nucleotide sequence of any one of SEQ ID NOs: 1337, 1352, 1372, and 1390, or
(B) the expression of a target gene of the nucleic acid of (a), (b), or (c), and
(ii) a carrier therefor.

78. A composition comprising
(i) a nucleic acid selected from the group consisting of
(a) the nucleic acid of claim 65, wherein the SEQ ID NO is any one of 1, 3, 8, 20, 21, 22, 32, and 36
(b) a nucleic acid that
(b1) consists of a nucleotide sequence having an identity of 80% or more to the nucleotide sequence of any one of SEQ ID NOs: 1337, 1339, 1352, 1371, 1372, 1373, 1386, and 1390, or
(b2) hybridizes under stringent conditions with a strand complementary to a nucleic acid consisting of the nucleotide sequence of any one of SEQ ID NOs: 1337, 1339, 1352, 1371, 1372, 1373, 1386, and 1390,
(c) a nucleic acid consisting of a nucleotide sequence complementary to the nucleic acid of (a),
(d) a nucleic acid consisting of a nucleotide sequence complementary to the nucleic acid of (b),
(e) a double-stranded nucleic acid consisting of the nucleic acid of (a) and the nucleic acid of (c), and
(f) a double-stranded nucleic acid consisting of the nucleic acid of (b) and the nucleic acid of (d), and
(ii) a carrier therefor.

79. A composition comprising
a substance that promotes or suppresses
(A) the expression or function of
(a) the nucleic acid of claim 65, wherein the SEQ ID NO is any one of 1, 3, 8, 20, 21, 22, 32, and 36,
(b) a nucleic acid consisting of a nucleotide sequence having an identity of 80% or more to the nucleotide sequence of any one of SEQ ID NOs: 1337, 1339, 1352, 1371, 1372, 1373, 1386, and 1390, or
(c) a nucleic acid that hybridizes under stringent conditions with a strand complementary to a nucleic acid consisting of the nucleotide sequence of any one of SEQ ID NOs: 1337, 1339, 1352, 1371, 1372, 1373, 1386, and 1390, or
(B) the expression of a target gene of the nucleic acid of (a), (b), or (c), and
(ii) a carrier therefor.

80. A composition comprising
(i) a nucleic acid selected from the group consisting of
(a) the nucleic acid of claim 65, wherein the SEQ ID NO is any one of 1, 2, 3, 8, 14, 20, 22, 25, 32, and 36,
(b) a nucleic acid consisting of a nucleotide sequence having an identity of 80% or more to the nucleotide sequence of any one of SEQ ID NOs: 1337, 1338, 1339, 1352, 1363, 1371, 1373, 1377, 1386, and 1390, and
(c) a nucleic acid that hybridizes under stringent conditions with a strand complementary to a nucleic acid consisting of the nucleotide sequence of any one of SEQ ID NOs: 1337, 1338, 1339, 1352, 1363, 1371, 1373, 1377, 1386, and 1390, and
(ii) a carrier therefor.

81. A composition comprising
(i) a nucleic acid consisting of a nucleotide sequence complementary to a nucleic acid selected from the group consisting of
(a) the nucleic acid of claim 65, wherein the SEQ ID NO is any one of 1, 2, 3, 8, 14, 20, 22, 25, 32, and 36,
(b) a nucleic acid consisting of a nucleotide sequence having an identity of 80% or more to the nucleotide sequence of any one of SEQ ID NOs: 1337, 1338, 1339, 1352, 1363, 1371, 1373, 1377, 1386, and 1390, and
(c) a nucleic acid that hybridizes under stringent conditions with a strand complementary to a nucleic acid consisting of the nucleotide sequence of any one of SEQ ID NOs: 1337, 1338, 1339, 1352, 1363, 1371, 1373, 1377, 1386, and 1390, and
(ii) a carrier therefor.

82. A composition comprising
(i) a double-stranded nucleic acid consisting of a
(A) a first strand nucleic acid selected from the group consisting of
(a) the nucleic acid of claim 65, wherein the SEQ ID NO is any one of 1, 2, 3, 8, 14, 20, 22, 25, 32, and 36,
(b) a nucleic acid consisting of a nucleotide sequence having an identity of 80% or more to the nucleotide sequence of any one of SEQ ID NOs: 1337, 1338, 1339, 1352, 1363, 1371, 1373, 1377, 1386, and 1390, and
(c) a nucleic acid that hybridizes under stringent conditions with a strand complementary to a nucleic acid consisting of the nucleotide sequence of any one of SEQ ID NOs: 1337, 1338, 1339, 1352, 1363, 1371, 1373, 1377, 1386, and 1390, and
(B) a second strand nucleic acid consisting of a nucleotide sequence complementary to the nucleotide sequence of the first strand nucleic acid, and
(ii) a carrier therefor.

83. A composition comprising
(i) a substance that promotes or suppresses
(A) the expression or function of a nucleic acid selected from the group consisting of
(a) the nucleic acid of claim 65, wherein the SEQ ID NO is any one of 1, 2, 3, 8, 14, 20, 22, 25, 32, and 36,
(b) a nucleic acid consisting of a nucleotide sequence having an identity of 80% or more to the nucleotide sequence of any one of SEQ ID NOs: 1337, 1338, 1339, 1352, 1363, 1371, 1373, 1377, 1386, and 1390, and
(c) a nucleic acid that hybridizes under stringent conditions with a strand complementary to a nucleic acid consisting of the nucleotide sequence of any one of SEQ ID NOs: 1337, 1338, 1339, 1352, 1363, 1371, 1373, 1377, 1386, and 1390, or
(B) the expression of a target gene of the nucleic acid of (a), (b), or (c), and
(ii) a carrier therefor.

84. A composition comprising
(i) a nucleic acid selected from the group consisting of
(a) the nucleic acid of claim 65, wherein the SEQ ID NO is 1,
(b) a nucleic acid that
(b1) consists of a nucleotide sequence having an identity of 80% or more to the nucleotide sequence of SEQ ID NO: 1337, or
(b2) hybridizes under stringent conditions with a strand complementary to a nucleic acid consisting of the nucleotide sequence of SEQ ID NO: 1337,
(c) a nucleic acid consisting of a nucleotide sequence complementary to the nucleic acid of claim 65, wherein the SEQ ID NO is any one of 8, 21, and 36, and
(d) a nucleic acid consisting of a nucleotide sequence complementary to a nucleic acid that
(d1) consists of a nucleotide sequence having an identity of 80% or more with the nucleotide sequence of any one of SEQ ID NOs: 1352, 1372 and 1390, or
(d2) hybridizes under stringent conditions with a strand complementary to a nucleic acid consisting of the nucleotide sequence of any one of SEQ ID NOs: 1352, 1372 and 1390, and
(ii) a carrier therefor.

85. A composition comprising
(i) a nucleic acid selected from the group consisting of
(a) the nucleic acid of claim 65, wherein the SEQ ID NO is any one of 8, 21, and 36,
(b) a nucleic acid that
(b1) consists of a nucleotide sequence having an identity of 80% or more with the nucleotide sequence of any one of SEQ ID NOs: 1352, 1372, and 1390, or
(b2) hybridizes under stringent conditions with a strand complementary to a nucleic acid consisting of the nucleotide sequence of any one of SEQ ID NOs: 1352, 1372, and 1390,
(c) a nucleic acid consisting of a nucleotide sequence complementary to the nucleic acid of claim 65, wherein the SEQ ID NO is 1, and
(d) a nucleic acid that
(d1) consists of a nucleotide sequence having an identity of 80% or more to the nucleotide sequence of SEQ ID NO: 1337, or
(d2) hybridizes under stringent conditions with a strand complementary to a nucleic acid consisting of the nucleotide sequence of SEQ ID NO: 1337, and
(ii) a carrier therefor.

86. A composition comprising
(i) a double-stranded nucleic acid consisting of a
(A) a first strand nucleic acid selected from the group consisting of
(a) the nucleic acid of claim 65, wherein the SEQ ID NO is any one of 1, 8, 21, and 36,
(b) a nucleic acid that
(b1) consists of a nucleotide sequence having an identity of 80% or more to the nucleotide sequence of any one of SEQ ID NOs: 1337, 1352, 1372, and 1390, and
(c) hybridizes under stringent conditions with a strand complementary to a nucleic acid consisting of the nucleotide sequence of any one of SEQ ID NOs: 1337, 1352, 1372, and 1390,
(c) a nucleic acid consisting of a nucleotide sequence complementary to the nucleic acid of (a), and
(d) a nucleic acid consisting of a nucleotide sequence complementary to the nucleic acid of (b), and
(B) a second strand nucleic acid consisting of a nucleotide sequence complementary to the nucleotide sequence of the first strand nucleic acid, and
(ii) a carrier therefor.

87. A composition comprising
(i) a substance that promotes or suppresses
(A) the expression or function of a nucleic acid selected from the group consisting of
(a) the nucleic acid of claim 65, wherein the SEQ ID NO is any one of 1, 8, 21, and 36,
(b) a nucleic acid that
(b1) consists of a nucleotide sequence having an identity of 80% or more to the nucleotide sequence of any one of SEQ ID NOs: 1337, 1352, 1372, and 1390, and
(c) hybridizes under stringent conditions with a strand complementary to a nucleic acid consisting of the nucleotide sequence of any one of SEQ ID NOs: 1337, 1352, 1372, and 1390,
(c) a nucleic acid consisting of a nucleotide sequence complementary to the nucleic acid of (a), and
(d) a nucleic acid consisting of a nucleotide sequence complementary to the nucleic acid of (b), or
(B) the expression of a target gene of the nucleic acid of any one of (a) to (d), and
(ii) a carrier therefor.

88. A method of diagnosing a disease caused by a mast cell abnormality, which method comprises using the composition of claim 73 to diagnose a disease caused by a mast cell abnormality.

89. A method of treating a disease in a subject, which method comprises administering the composition of claim 73 to a subject suffering from a disease caused by a mast cell abnormality, thereby treating the disease caused by a mast cell abnormality in the subject.

90. A method of diagnosing a disease caused by a mast cell abnormality, which method comprises using the composition of claim 74 to diagnose a disease caused by a mast cell abnormality.

91. A method of treating a disease in a subject, which method comprises administering the composition of claim 74 to a subject suffering from a disease caused by a mast cell abnormality, thereby treating the disease caused by a mast cell abnormality in the subject.

92. A method of diagnosing a disease caused by a mast cell abnormality, which method comprises using the composition of claim 75 to diagnose a disease caused by a mast cell abnormality.

93. A method of treating a disease in a subject, which method comprises administering the composition of claim 75 to a subject suffering from a disease caused by a mast cell abnormality, thereby treating the disease caused by a mast cell abnormality in the subject.

94. A method of diagnosing a disease caused by an abnormality of mesenchymal stem cell proliferation and/or differentiation, which method comprises using the composition of claim 76 to diagnose a disease caused by an abnormality of mesenchymal stem cell proliferation and/or differentiation.

95. A method of treating a disease in a subject, which method comprises administering the composition of claim 76 to a subject suffering from a disease caused by an abnormality of mesenchymal stem cell proliferation and/or differentiation, thereby treating the disease caused by an abnormality of mesenchymal stem cell proliferation and/or differentiation in the subject.

96. A method of diagnosing a disease caused by an abnormality of mesenchymal stem cell proliferation and/or differentiation, which method comprises using the composition of claim 77 to diagnose a disease caused by an abnormality of mesenchymal stem cell proliferation and/or differentiation.

97. A method of treating a disease in a subject, which method comprises administering the composition of claim 77 to a subject suffering from a disease caused by an abnormality of mesenchymal stem cell proliferation and/or differentiation, thereby treating the disease caused by an abnormality of mesenchymal stem cell proliferation and/or differentiation in the subject.

98. A method of diagnosing a disease caused by a cell proliferation abnormality, which method comprises using the composition of claim 78 to diagnose a disease caused by a cell proliferation abnormality.

99. A method of treating a disease in a subject, which method comprises administering the composition of claim 78 to a subject suffering from a disease caused by a cell proliferation abnormality, thereby treating the disease caused by a cell proliferation abnormality in the subject.

100. The method of claim 99, wherein the disease caused by a cell proliferation abnormality is a disease selected from the group consisting of cancers, arteriosclerosis, rheumatoid arthritis, prostatic hyperplasia, blood vessel restenosis after percutaneous transvascular coronary angioplasty, fibroid lung, glomerulonephritis, and autoimmune diseases.

101. A method of suppressing cell proliferation, which method comprises using the composition of claim 78 as a cell proliferation suppressant to suppress cell proliferation.

102. A method of diagnosing a disease caused by a cell proliferation abnormality, which method comprises using the composition of claim 79 to diagnose a disease caused by a cell proliferation abnormality.

103. A method of treating a disease in a subject, which method comprises administering the composition of claim 79 to a subject suffering from a disease caused by a cell proliferation abnormality, thereby treating the disease caused by a cell proliferation abnormality in the subject.

104. The method of claim 103, wherein the disease caused by a cell proliferation abnormality is a disease selected from the group consisting of cancers, arteriosclerosis, rheumatoid arthritis, prostatic hyperplasia, blood vessel restenosis after percutaneous transvascular coronary angioplasty, fibroid lung, glomerulonephritis, and autoimmune diseases.

105. A method of suppressing or promoting cell proliferation, which method comprises using the composition of claim 79 as a cell proliferation suppressant or a cell proliferation promoter to suppress cell proliferation or to promote cell proliferation, respectively.

106. A method of promoting mast cell degranulation, which method comprises using the composition of claim 80 as a mast cell degranulation promoter to promote mast cell degranulation.

107. A method of suppressing mast cell degranulation, which method comprises using the composition of claim 81 as a mast cell degranulation suppressant to suppress mast cell degranulation.

108. A method of promoting or suppressing mast cell degranulation, which method comprises using the composition of claim 82 as a mast cell degranulation promoter or a mast cell degranulation suppressant to promote mast cell degranulation or to suppress mast cell degranulation, respectively.

109. A method of promoting or suppressing mast cell degranulation, which method comprises using the composition of claim 83 as a mast cell degranulation promoter or a mast cell degranulation suppressant to promote mast cell degranulation or to suppress mast cell degranulation, respectively.

110. A method of promoting mesenchymal stem cell proliferation, which method comprises using the composition of claim 84 as a mesenchymal stem cell proliferation promoter to promote mesenchymal stem cell proliferation.

111. A method of suppressing mesenchymal stem cell proliferation, which method comprises using the composition of claim 85 as a mesenchymal stem cell proliferation suppressant to suppress mesenchymal stem cell proliferation.

112. A method of promoting or suppressing mesenchymal stem cell proliferation, which method comprises using the composition of claim 86 as a mesenchymal stem cell proliferation promoter or a mesenchymal stem cell proliferation suppressant to promote mesenchymal stem cell proliferation or to suppress mesenchymal stem cell proliferation, respectively.

112. A method of promoting or suppressing mesenchymal stem cell proliferation, which method comprises using the composition of claim 87 as a mesenchymal stem cell proliferation promoter or a mesenchymal stem cell proliferation suppressant to promote mesenchymal stem cell proliferation or to suppress mesenchymal stem cell proliferation, respectively.

113. A method of detecting expression or a mutation of a nucleic acid, which method comprises using a nucleic acid selected from the group consisting of
(a) the nucleic acid of claim 65,
(b) a nucleic acid that
(b1) consists of a nucleotide sequence having an identity of 80% or more to the nucleotide sequence of any one of SEQ ID NOs: 1337 to 2851, or
(b2) hybridizes under stringent conditions with a strand complementary to a nucleic acid consisting of the nucleotide sequence of any one of SEQ ID NOs: 1337 to 2851,
(c) a nucleic acid consisting of a nucleotide sequence complementary to the nucleic acid of (a),
(d) a nucleic acid consisting of a nucleotide sequence complementary to the nucleic acid of (b),
(e) a double-stranded nucleic acid consisting of the nucleic acid of (a) and (c), and
(f) a double-stranded nucleic acid consisting of the nucleic acid of (b) and (d), to detect expression or a mutation of a nucleic acid of any one of (a) to (f).

114. A method of screening for a substance that promotes or suppresses expression or function of a nucleic acid, which method comprises using a nucleic acid selected from the group consisting of
(a) the nucleic acid of claim 65,
(b) a nucleic acid that
(b1) consists of a nucleotide sequence having an identity of 80% or more to the nucleotide sequence of any one of SEQ ID NOs: 1337 to 2851, or
(b2) hybridizes under stringent conditions with a strand complementary to a nucleic acid consisting of the nucleotide sequence of any one of SEQ ID NOs: 1337 to 2851,
(c) a nucleic acid consisting of a nucleotide sequence complementary to the nucleic acid of (a),
(d) a nucleic acid consisting of a nucleotide sequence complementary to the nucleic acid of (b),
(e) a double-stranded nucleic acid consisting of the nucleic acid of (a) and (c), and
(f) a double-stranded nucleic acid consisting of the nucleic acid of (b) and (d), to screen for a substance that promotes or suppresses expression or function of a nucleic acid of any one of (a) to (f).

115. A method of isolating a cell, which method comprises using a nucleic acid selected from the group consisting of
(a) the nucleic acid of claim 65,
(b) a nucleic acid that
(b1) consists of a nucleotide sequence having an identity of 80% or more to the nucleotide sequence of any one of SEQ ID NOs: 1337 to 2851, or
(b2) hybridizes under stringent conditions with a strand complementary to a nucleic acid consisting of the nucleotide sequence of any one of SEQ ID NOs: 1337 to 2851,
(c) a nucleic acid consisting of a nucleotide sequence complementary to the nucleic acid of (a),
(d) a nucleic acid consisting of a nucleotide sequence complementary to the nucleic acid of (b),
(e) a double-stranded nucleic acid consisting of the nucleic acid of (a) and (c), and
(f) a double-stranded nucleic acid consisting of the nucleic acid of (b) and (d), to isolate a cell that expresses a nucleic acid of any one of (a) to (f).

116. A method of suppressing expression of a target gene, which method comprises using a nucleic acid selected from the group consisting of
(a) the nucleic acid of claim 65,
(b) a nucleic acid that
(b1) consists of a nucleotide sequence having an identity of 80% or more to the nucleotide sequence of any one of SEQ ID NOs: 1337 to 2851, or
(b2) hybridizes under stringent conditions with a strand complementary to a nucleic acid consisting of the nucleotide sequence of any one of SEQ ID NOs: 1337 to 2851,
(c) a nucleic acid consisting of a nucleotide sequence complementary to the nucleic acid of (a),
(d) a nucleic acid consisting of a nucleotide sequence complementary to the nucleic acid of (b),
(e) a double-stranded nucleic acid consisting of the nucleic acid of (a) and (c), and
(f) a double-stranded nucleic acid consisting of the nucleic acid of (b) and (d), to suppress expression of a target gene of a nucleic acid of any one of (a) to (f).

117. A method of screening for a diagnostic reagent for a disease caused by a mast cell abnormality, which method comprises using promotion or suppression of expression or function of a nucleic acid selected from the group consisting of
(a) the nucleic acid of claim 65,
(b) a nucleic acid that
(b1) consists of a nucleotide sequence having an identity of 80% or more to the nucleotide sequence of any one of SEQ ID NOs: 1337 to 2851, or
(b2) hybridizes under stringent conditions with a strand complementary to a nucleic acid consisting of the nucleotide sequence of any one of SEQ ID NOs: 1337 to 2851,
(c) a nucleic acid consisting of a nucleotide sequence complementary to the nucleic acid of (a),
(d) a nucleic acid consisting of a nucleotide sequence complementary to the nucleic acid of (b),
(e) a double-stranded nucleic acid consisting of the nucleic acid of (a) and (c), and
(f) a double-stranded nucleic acid consisting of the nucleic acid of (b) and (d), as an index to screen for a diagnostic reagent for a disease caused by a mast cell abnormality.

118. A method of screening for a diagnostic reagent for a disease caused by a mast cell abnormality, which method comprises using suppression of expression of a target gene of a nucleic acid selected from the group consisting of
(a) the nucleic acid of claim 65,
(b) a nucleic acid that
(b1) consists of a nucleotide sequence having an identity of 80% or more to the nucleotide sequence of any one of SEQ ID NOs: 1337 to 2851, or
(b2) hybridizes under stringent conditions with a strand complementary to a nucleic acid consisting of the nucleotide sequence of any one of SEQ ID NOs: 1337 to 2851,
(c) a nucleic acid consisting of a nucleotide sequence complementary to the nucleic acid of (a),
(d) a nucleic acid consisting of a nucleotide sequence complementary to the nucleic acid of (b),
(e) a double-stranded nucleic acid consisting of the nucleic acid of (a) and (c), and
(f) a double-stranded nucleic acid consisting of the nucleic acid of (b) and (d), as an index to screen for a diagnostic reagent for a disease caused by a mast cell abnormality.

119. A method of screening for a mast cell degranulation promoter or a mast cell degranulation suppressant, which method comprises using promotion or suppression of
(i) the expression or function of a nucleic acid selected from the group consisting of
(a) the nucleic acid of claim 65, wherein the SEQ ID NO is any one of 1, 2, 3, 8, 14, 20, 22, 25, 32, and 36,
(b) a nucleic acid consisting of a nucleotide sequence having an identity of 80% or more to the nucleotide sequence of any one of SEQ ID NOs: 1337, 1338, 1339, 1352, 1363, 1371, 1373, 1377, 1386, and 1390, and
(c) a nucleic acid that hybridizes under stringent conditions with a strand complementary to a nucleic acid consisting of the nucleotide sequence of any one of SEQ ID NOs: 1337, 1338, 1339, 1352, 1363, 1371, 1373, 1377, 1386, and 1390, or
(ii) the expression of a target gene of the nucleic acid of (a), (b), or (c), as an index to screen for a mast cell degranulation promoter or a mast cell degranulation suppressant.

120. A method of screening for a diagnostic reagent for a disease caused by an abnormality of mesenchymal stem cell proliferation and/or differentiation, which method comprises using promotion or suppression of
(i) the expression or function of a nucleic acid selected from the group consisting of
(a) the nucleic acid of claim 65, wherein the SEQ ID NO is any one of 1, 8, 21, and 36,
(b) a nucleic acid consisting of a nucleotide sequence having an identity of 80% or more to the nucleotide sequence of any one of SEQ ID NOs: 1337, 1352, 1372, and 1390, and
(c) a nucleic acid that hybridizes under stringent conditions with a strand complementary to a nucleic acid consisting of the nucleotide sequence of any one of SEQ ID NOs: 1337, 1352, 1372, and 1390, or
(ii) the expression of a target gene of the nucleic acid of (a), (b), or (c), as an index to screen for a diagnostic reagent for a disease caused by an abnormality of mesenchymal stem cell proliferation and/or differentiation.

121. A method of screening for a mesenchymal stem cell proliferation promoter or a mesenchymal stem cell proliferation suppressant, which method comprises using promotion or suppression of
(i) the expression or function of a nucleic acid selected from the group consisting of
(a) the nucleic acid of claim 65, wherein the SEQ ID NO is any one of 1, 8, 21, and 36,
(b) the nucleic acid that
(b1) consists of a nucleotide sequence having an identity of 80% or more with the nucleotide sequence of any one of SEQ ID NOs: 1337, 1352, 1372, and 1390, or
(b2) hybridizes under stringent conditions with a strand complementary to a nucleic acid consisting of the nucleotide sequence of any one of SEQ ID NOs: 1337, 1352, 1372, and 1390,
(c) a nucleic acid consisting of a nucleotide sequence complementary to the nucleic acid of (a), and
(d) a nucleic acid consisting of a nucleotide sequence complementary to the nucleic acid of (b), or
(ii) the expression of a target gene of the nucleic acid of any one of (a) to (d), as an index to screen for a mesenchymal stem cell proliferation promoter or a mesenchymal stem cell proliferation suppressant.

122. A method of screening for a diagnostic reagent for a disease caused by a cell proliferation abnormality, which method comprises using promotion or suppression of
(i) the expression or function of
(a) the nucleic acid of claim 65, wherein the SEQ ID NO is any one of 1, 3, 8, 20, 21, 22, 32, and 36,
(b) a nucleic acid consisting of a nucleotide sequence having an identity of 80% or more to the nucleotide sequence of any one of SEQ ID NOs: 1337, 1339, 1352, 1371, 1372, 1373, 1386, and 1390, or
(c) a nucleic acid that hybridizes under stringent conditions with a strand complementary to a nucleic acid consisting of the nucleotide sequence of any one of SEQ ID NOs: 1337, 1339, 1352, 1371, 1372, 1373, 1386, and 1390, or
(ii) the expression of a target gene of the nucleic acid of (a), (b), or (c), as an index to screen for a diagnostic reagent for a disease caused by a cell proliferation abnormality.

123. A method of screening for a cell proliferation suppressant or proliferation promoter, which method comprises using promotion or suppression of
(i) the expression or function of
(a) the nucleic acid of claim 65, wherein the SEQ ID NO is any one of 1, 3, 8, 20, 21, 22, 32, and 36,
(b) a nucleic acid consisting of a nucleotide sequence having an identity of 80% or more to the nucleotide sequence of any one of SEQ ID NOs: 1337, 1339, 1352, 1371, 1372, 1373, 1386, and 1390, or
(c) a nucleic acid that hybridizes under stringent conditions with a strand complementary to a nucleic acid consisting of the nucleotide sequence of any one of SEQ ID NOs: 1337, 1339, 1352, 1371, 1372, 1373, 1386, and 1390, or
(ii) the expression of a target gene of the nucleic acid of (a), (b), or (c), as an index to screen for a cell proliferation suppressant or proliferation promoter.

124. A method of screening for a therapeutic agent for a disease caused by a mast cell abnormality, which method comprises using promotion or suppression of the expression or function of a nucleic acid selected from the group consisting of
(a) the nucleic acid of claim 65,
(b) a nucleic acid that
(b1) consists of a nucleotide sequence having an identity of 80% or more to the nucleotide sequence of any one of SEQ ID NOs: 1337 to 2851, or
(b2) hybridizes under stringent conditions with a strand complementary to a nucleic acid consisting of the nucleotide sequence of any one of SEQ ID NOs: 1337 to 2851,
(c) a nucleic acid consisting of a nucleotide sequence complementary to the nucleic acid of (a),
(d) a nucleic acid consisting of a nucleotide sequence complementary to the nucleic acid of (b),
(e) a double-stranded nucleic acid consisting of the nucleic acid of (a) and (c), and
(f) a double-stranded nucleic acid consisting of the nucleic acid of (b) and (d), as an index to screen for a therapeutic agent for a disease caused by a mast cell abnormality.

125. A method of screening for a therapeutic agent for a disease caused by a mast cell abnormality, which method comprises using suppression of the expression of a target gene of a nucleic acid selected from the group consisting of
(a) the nucleic acid of claim 65,
(b) a nucleic acid that
(b1) consists of a nucleotide sequence having an identity of 80% or more to the nucleotide sequence of any one of SEQ ID NOs: 1337 to 2851, or
(b2) hybridizes under stringent conditions with a strand complementary to a nucleic acid consisting of the nucleotide sequence of any one of SEQ ID NOs: 1337 to 2851,
(c) a nucleic acid consisting of a nucleotide sequence complementary to the nucleic acid of (a),
(d) a nucleic acid consisting of a nucleotide sequence complementary to the nucleic acid of (b),
(e) a double-stranded nucleic acid consisting of the nucleic acid of (a) and (c), and
(f) a double-stranded nucleic acid consisting of the nucleic acid of (b) and (d), as an index to screen for a therapeutic agent for a disease caused by a mast cell abnormality.

126. A method of screening for a therapeutic agent for a disease caused by an abnormality of mesenchymal stem cell proliferation and/or differentiation, which method comprises using promotion or suppression of
(i) the expression or function of
(a) the nucleic acid of claim 65, wherein the SEQ ID NO is any one of 1, 8, 21, and 36,
(b) a nucleic acid consisting of a nucleotide sequence having an identity of 80% or more to the nucleotide sequence of any one of SEQ ID NOs: 1337, 1352, 1372, and 1390, or
(c) a nucleic acid that hybridizes under stringent conditions with a strand complementary to a nucleic acid consisting of the nucleotide sequence of any one of SEQ ID NOs: 1337, 1352, 1372, and 1390, or
(ii) the expression of a target gene of the nucleic acid of (a), (b), or (c), as an index to screen for a therapeutic agent for a disease caused by an abnormality of mesenchymal stem cell proliferation and/or differentiation.

127. A method of screening for a therapeutic agent for a disease caused by a cell proliferation abnormality, which method comprises using promotion or suppression of
(i) the expression or function of
(a) the nucleic acid of claim 65, wherein the SEQ ID NO is any one of 1, 3, 8, 20, 21, 22, 32, and 36,
(b) a nucleic acid consisting of a nucleotide sequence having an identity of 80% or more to the nucleotide sequence of any one of SEQ ID NOs: 1337, 1339, 1352, 1371, 1372, 1373, 1386, and 1390, or
(c) a nucleic acid that hybridizes under stringent conditions with a strand complementary to a nucleic acid consisting of the nucleotide sequence of any one of SEQ ID NOs: 1337, 1339, 1352, 1371, 1372, 1373, 1386, and 1390, or
(ii) the expression of a target gene of the nucleic acid of (a), (b), or (c), as an index to screen for a therapeutic agent for a disease caused by a cell proliferation abnormality.
